(19) United States
(12) Patent Application Publication
(10) Pub. No.: US 2014/0011739 A1
(43) Pub. Date: Jan. 9, 2014

(54) PROTOZOAN VARIANT-SPECIFIC SURFACE PROTEINS (VSP) AS CARRIERS FOR ORAL DRUG DELIVERY

(71) Applicants: Inserm(Institut National De La Sante Et De La Recherche Medicale), Paris (FR); Consejo Nacional De Investigaciones Cientificas Y Tecnicas (Conicet), Buenos Aires, AR (US)

(72) Inventors: David KLATZMANN, Paris (FR); Eliane Piaggio, Paris (FR); Hugo Lujan, Cordoba (AR)

(21) Appl. No.: 13/843,766

(22) Filed: Mar. 15, 2013

Related U.S. Application Data
(60) Provisional application No. 61/668,865, filed on Jul. 6, 2012.

(51) Int. Cl. A61K 47/42

(52) U.S. Cl. CPC A61K 47/42
USPC 514/5.9; 514/773; 514/1.1; 514/11.4; 514/11.7

(57) ABSTRACT

The invention provides compositions for oral delivery and methods of treatment using VSP carriers, such as Giardia sp. variable surface proteins (VSP), to deliver therapeutic agents. VSP drug carriers can be combined with bioactive peptides, e.g., insulin, glucagon, or hGH, and be administered orally or mucosally. VSP carriers are resistant to acidic pHs and to proteolytic degradation and protect therapeutic agents from degradation in the gastrointestinal tract.

### REFERENCE TO SEQUENCE LISTING SUBMITTED ELECTRONICALLY

[0001] The content of the electronically submitted sequence listing in ASCII text file (Name 3181_{—}0010001_sequence_listing_ST25.txt; Size: 2,810,010 bytes; and Date of Creation: Mar. 13, 2013) filed with the application is incorporated herein by reference in its entirety.

### BACKGROUND

[0002] The present invention relates to compositions and methods to deliver therapeutic agents to a subject in need thereof using polypeptide carriers. More particularly, the present invention relates to polypeptides such as Giardia sp. variable surface proteins (VSPs) that act as carriers for the delivery of therapeutic agents such as bioactive peptides.

[0003] Oral delivery represents the ideal means of delivering prophylactic and therapeutic agents because of ease of administration, patient compliance, and cost. However, the oral route is also the most difficult because of the numerous barriers posed by the gastrointestinal tract (GIT). The main challenges are enzymatic degradation in the stomach and upper intestinal tract, and lack of sufficient permeability through the GIT. Low pH in the stomach can subject therapeutic agents to physical and chemical degradation. Physical degradation of peptides generally involves modification of the native structure of a protein to a higher-order structure which may be a result of adsorption, aggregation, unfolding, precipitation, and/or complete/partial degradation to its amino acidic components. Chemical degradation usually involves blond cleavage and leads to the formation of a new product.

[0004] Giardia is an intestinal pathogen which is capable of surviving the harsh environmental conditions in the stomach and the upper small intestine. Like many protozoan microorganisms, Giardia undergoes antigenic variation (see, e.g., Zambrano-Villa et al., Trends Parasitol. 18: 272-8 (2002)), a mechanism by which it continuously switches its major surface molecules allowing the parasite to evade the host's immune response and establish chronic and/or recurrent infections (see, e.g., Nash, Mol. Microbiol. 45:585-90 (2002)). These surface antigens belong to a family of Variant-specific Surface Proteins (VSPs), which are integral membrane proteins that cover the entire surface of trophozoites.

[0005] VSPs possess a cysteine-rich amino-terminal region, and a conserved carboxy-terminal domain including a transmembrane region and a short cytoplasmic tail (FIG. 1C). There is a repertoire of about 200 VSP genes in the Giardia's genome, but only one VSP is expressed on the surface of the parasite at any given time (see, e.g., Prucca et al., Nature 456(7223):750-4 (2008); Deitsch et al., Microbiol. Mol. Biol. Rev. 61:281-93 (1997)).

[0006] Since the extracellular portion of Giardia VSPs allows the parasite to survive within the hostile environment of the upper small intestine, VSPs covalently bound to antigens have been used to shuttle candidate antigens. It has been observed that when vaccines comprising VSPs covalently bound to Giardia antigens are administered orally, the vaccines fully protect animals from subsequent infections by the Giardia parasite, indicating that the antigens have survived the passage through the GIT (Rivero et al., Nat. Med. 16(5):551-7 (2010), see, e.g., PCT Pub. Nos. WP2010/064204 and WO2011/120994, which are herein incorporated by reference in their entireties).

[0007] Type 1 diabetes is usually diagnosed in children and young adults, and is responsible for a growing proportion of national health care expenditures. Type 1 diabetes is an autoimmune disease that results from a dysfunction of the immune system that attacks and destroys the β-cells of the pancreatic islets producing insulin.

[0008] Administration of exogenous insulin is the only medication that can be used to control the increases in blood sugar that occur with the disease. Type 2 diabetes, by contrast, is characterized by defects in both insulin secretion and insulin action, with insulin deficiency usually emerging later during the course of the disease. Insulin supplementation is often required to attain good glucose levels control in this disease (see, e.g., DeWitt & Hirsch, JAMA 289:2254-2264 (2003)). There are different types of subcutaneous insulin available (Summers et al., Clin. Ther. 26:1498-1505 (2004)). However, surveys indicate substantial resistance to insulin therapy on the part of patients with type 2 diabetes due to anticipated pain and inconvenience (Peyrot et al., Diabetes Care 28:2673-2679 (2005)). The youngest and oldest patients are least likely to accept injectable therapy and thus pose the greatest challenge for physicians who want to initiate insulin treatment (Freemantle et al., Diabetes Care 28:427-428 (2005)). Consequently, efforts to develop oral, nasal, and inhaled formulations of insulin have been driven by the preference of patients to avoid subcutaneous injections (Cefalu, Ann. Med. 33:579-586 (2001); Graham et al., N. Engl. J. Med. 356:497-502 (2007)). Thus, the option of delivering insulin by the oral route remains an attractive therapeutic strategy.

[0009] Glucagon, a peptide hormone secreted by the pancreas, raises blood glucose levels. Its effect is opposite that of insulin, which lowers blood glucose levels. Glucagon is indicated and used as a treatment for severe hypoglycemia. Because patients with type 1 diabetes may have less of an increase in blood glucose levels compared with a stable type 2 patient, supplementary carbohydrates should be given as soon as possible, especially to a pediatric patient. Glucagon is also indicated as a diagnostic aid in the radiologic examination of the stomach, duodenum, small bowel, and colon when diminished intestinal motility would be advantageous. Glucagon is as effective for this examination as are the anticholinergic drugs. However, the addition of the anticholinergic agent may result in increased side effects. As in the case of insulin, the development of forms of glucagon suitable for oral delivery is an attractive therapeutic strategy.

[0010] Growth hormone deficiency is a disorder that involves the pituitary gland, which produces growth hormone and other hormones. Human growth hormone (hGH) stimulates growth and cell reproduction in humans, also exerting its action on metabolism of lipids, proteins and carbohydrates. Recombinant hGH is commonly produced by bacterial fermentation (Zeisel et al., Horm. Res. 37(Suppl 2):5-13 (1992); Sonoda & Sigimura, Biosci. Biotechnol. Biochem. 72:2675-80 (2008)). When the pituitary gland does not produce enough growth hormone, growth will be slower than normal. Growth hormone is needed for normal growth in children. In adults, growth hormone is needed to maintain the proper amounts of body fat, muscle, and bone. hGH deficiency can occur at any age. Children and some adults with growth hormone deficiency will benefit from growth hormone therapy. To treat growth hormone deficiencies, hGH (human growth hormone) is generally prescribed. hGH is an injectable drug which is injected underneath the fat of the patient's skin several times a week (Brearley et al., BMC Clin. Pharmacol. 7:10 (2007)). As in the case of insulin treatment, patient's resistance to the initiation injectable therapy and compliance pose challenges for physicians. Accordingly, the development of hGH forms suitable for oral delivery is an attractive therapeutic strategy.

### BRIEF SUMMARY

[0011] The present disclosure provides compositions and methods comprising VSP-carriers for the delivery of therapeutic agents, e.g., bioactive peptides such as insulin, glucagon, or growth hormone, to a target location in a subject in need thereof, for example, via oral or mucosal administration.

[0012] More particularly, the disclosure provides the use of a VSP polypeptide, e.g., a Giardia parasite's variable surface protein (VSP) or a fragment thereof (e.g., the extracellular domain of a Giardia VSP or a CXXC motif-comprising fragment thereof) as a carrier to deliver a therapeutic agent via oral or mucosal administration. VSP carriers of the invention are not covalently bound to the therapeutic agents via peptidic bonds

[0013] Accordingly, the present disclosure provides a therapeutic composition comprising a VSP carrier and a therapeutic agent. In some embodiments, the composition is formulated for oral administration. In other embodiments, the composition is formulated for mucosal administration. In some embodiments, the VSP carrier is a VSP, a VSP-like protein, a VSP or VSP-like protein fragment, a VSP or VSP-like protein derivative, or a combination of two or more of said VSP carriers.

[0014] In some embodiments, the VSP carrier comprises a VSP from Giardia or a fragment thereof. In other embodiments, the VSP from Giardia or a fragment thereof comprises a VSP extracellular domain. In other embodiments, the VSP from Giardia is VSP1267. In some specific embodiments, the VSP carrier comprises the amino acid sequence of SEQ ID NO:2. In other embodiments, the VSP carrier further comprises a heterologous moiety. In some embodiments, the heterologous moiety is a protein purification tag sequence. In some embodiments, the protein purification tag sequence is a His6 tag. In some specific embodiments, the VSP carrier consists of the sequence of SEQ ID NO:1.

[0015] In some embodiments, the therapeutic agent is a biological agent. In some embodiments, the biological agent is a bioactive peptide. In some embodiments, the bioactive peptide is insulin, human growth hormone, glucagon, fragments, analogs, derivatives or variants thereof, or a combination of two or more of said bioactive peptides. In some embodiments, the bioactive peptide is a natural insulin. In other embodiments, the bioactive peptide is a recombinant insulin. In some embodiments, the bioactive peptide is an insulin analog. In other embodiments, the insulin analog is a fast-acting insulin. In other embodiments, the insulin analog is a long-acting insulin. In some embodiments, the fast-acting insulin is insulin aspart. In other embodiments, the long-acting insulin is insulin glargine.

[0016] In some embodiments, the molecule to molecule ratio of VSP carrier to the therapeutic agent ranges from about 10:1 to about 1:10. In other embodiments, the molecule to molecule ratio of VSP carrier to the therapeutic agent ranges from about 3:1 to about 1:3. In some embodiments, the molecule to molecule ratio of VSP carrier to the therapeutic agent is 3:1. In other embodiments, the molecule to molecule ratio of VSP carrier to the therapeutic agent is 1:1. In some embodiments, the composition further comprises a pharmaceutically acceptable excipient.

[0017] Also provided is a method of delivering a therapeutic agent to a target location in a subject comprising administering a therapeutic composition comprising a VSP carrier and a therapeutic agent to a subject in need thereof. The present disclosure also provides a method of treating a disease or condition in a subject comprising administering an effective amount of a therapeutic composition comprising a VSP carrier and a therapeutic agent to a subject in need thereof. In some embodiments, the disease or condition is a hormone deficiency. In some embodiments, the hormone deficiency is an insulin deficiency. In some embodiments, the insulin deficiency is type 1 diabetes.

[0018] Also provided is a method of treating a disease or condition in a subject comprising combining a VSP carrier and a therapeutic agent, where the VSP carrier binds to the therapeutic agent, and administering an effective amount of the combination of VSP carrier and therapeutic agent to the subject. The instant disclosure also provides a method of increasing the resistance of a therapeutic agent to enzymatic degradation comprising combining a VSP carrier and a therapeutic agent, where the VSP carrier can bind to the therapeutic agent, and wherein combining the VSP carrier and the therapeutic agent results in increased resistance of the therapeutic agent to enzymatic degradation.

[0019] The present disclosure also provides a method of increasing the resistance of a therapeutic agent to pH denaturation comprising combining a VSP carrier and a therapeutic agent, where the VSP carrier can bind to the therapeutic agent, and where combining the VSP carrier and the therapeutic agent results in increased resistance of the therapeutic agent to pH denaturation. Also provided is a method of increasing the attachability of a therapeutic agent to mucosal epithelial cells comprising combining a VSP carrier and a therapeutic agent, where the VSP carrier can bind to the therapeutic agent, and where combining the VSP carrier and the therapeutic agent results in increased attachability of the therapeutic to mucosal epithelial cells. In some embodiments, the mucosal epithelial cells are intestinal epithelial cells. In other embodiments, the mucosal epithelial cells are gastric epithelial cells. In some embodiments, the mucosal epithelial cells are oral epithelial cells.

[0020] Also provided is a method of making an orally deliverable composition, comprising combining a VSP carrier and a therapeutic agent, where the VSP carrier can bind to the therapeutic agent. The present disclosure also provides a method of making an injectable composition suitable for oral administration comprising combining a VSP carrier and a therapeutic agent, where the VSP carrier can bind to the therapeutic agent. For example, an injectable insulin composition can be reformulated or made suitable for oral administration by combining the injectable composition with a VSP carrier. In some embodiments, the VSP carrier is a VSP, a VSP-like protein, a VSP or VSP-like protein fragment, a VSP or VSP-like protein derivative, or a combination of two or more of said VSP carriers. In some embodiments, the VSP carrier comprises a VSP from Giardia or a fragment thereof. In other embodiments, the VSP from Giardia or a fragment thereof comprises a VSP extracellular domain. In some embodiments, the VSP from Giardia is VSP1267. In other embodiments, the VSP carrier comprises the amino acid sequence of SEQ ID NO:2. In some embodiments, the VSP carrier further comprises a heterologous moiety. In other embodiments, the heterologous moiety is a protein purification tag sequence. In some embodiments, the protein purification tag sequence is a His6 tag. In other embodiments, the VSP carrier consists of the sequence of SEQ ID NO:1. In some embodiments, the therapeutic agent is a biological agent. In other embodiments, the biological agent is a bioactive peptide. In some embodiments, the bioactive peptide is insulin, human growth hormone, glucagon, fragments, analogs, derivatives or variants thereof, or a combination of two or more of said bioactive peptides. In some embodiments, the bioactive peptide is a natural insulin. In other embodiments, the bioactive peptide is a recombinant insulin. In some embodiments, the bioactive peptide is an insulin analog. In other embodiments, the insulin analog is a fast-acting insulin. In some embodiments, the insulin analog is a long-acting insulin. In other embodiments, the fast-acting insulin is insulin aspart. In some other embodiments, the long-acting insulin is insulin glargine.

### BRIEF DESCRIPTION OF THE DRAWINGS/FIGURES

[0021] FIG. 1A shows phase contrast (left panel) and immunofluorescence (right panel) assays showing that a group of Giardia trophozoites. Each trophozoite expresses a single VSP on its surface, which is different for each trophozoite as demonstrated by surface labeling with an anti-VSP specific monoclonal antibody.

[0022] FIG. 1B shows an anti-VSP specific immunogold labeling of the surface of a trophozoite. The entire surface of the parasite is labeled, including the ventral disk and the flagella, generating a thick surface coat.

[0023] FIG. 1C is a diagram showing the structural characteristics of VSPs. The diagram shows that VSPs are integral membrane proteins with a variable extracellular region rich in CXXC motifs (where C indicates a cysteine and X can be any amino acid), a unique transmembrane hydrophobic regions and a short, 5 amino acids long cytoplasmic tail.

[0024] FIG. 2A shows phase contrast (PC) images and immunofluorescent (IFA) images corresponding to two different Giardia isolates (WB and GS/M) treated with 100 μg/ml or 200 □g/ml trypsin. The monoclonal antibody G10/4 recognizes a conformational epitope in the VSPH7 VSP protein of the GS/M isolate. The monoclonal antibody 9B10 detects a non-conformational epitope in the VSP9B10 VSP protein of the WB isolate.

[0025] FIG. 2B shows phase contrast (PC) images and immunofluorescent (IFA) images corresponding to two different Giardia isolates (WB and GS/M) incubated at different pHs (1, 3, 5 and 8). The monoclonal antibody G10/4 recognizes a conformational epitope in the VSPH7 VSP protein of the GS/M isolate. The monoclonal antibody 9B10 detects a non-conformational epitope in the VSP9B10 VSP protein of the WB isolate.

[0026] FIG. 3 shows a Western blot analysis detecting the presence of three Giardia VSPs (VSP9B10, VSP1267 and VSPH7) after trophozoite trypsinization. Trophozoites were treated with trypsin at 200 μg/ml and 2 mg/ml concentrations, or incubated in medium without trypsin (control). A control sample corresponding to a mouse anti-alkaline phosphatase antibody (α-mouse) in also shown.

[0027] FIG. 4 shows immunohistochemistry microphotographs of intestinal sections from gerbils infected with WB9B10 Giardia trophozoites (FIG. 4A), non-infected gerbils (FIG. 4B), and gerbils immunized with the entire repertoire of Giardia VSPs purified from transgenic trophozoites (FIG. 4C).

[0028] FIG. 5A shows the amino acid sequence of a recombinant Giardia VSP corresponding to the extracellular portion of VSP1267 plus a C-terminal His6 tag (boxed amino acids) (SEQ ID NO:1). The N-terminal signal peptide is underlined.

[0029] FIG. 5B shows a Western blot detecting the recombinant VSP1267 using an anti-His6 monoclonal antibody.

[0030] FIG. 6 shows silver stained gels corresponding to insulins (NOVORAPID® and LANTUS®) preincubated with different concentrations of trypsin and pancreatine (a mixture of pancreatic juice components). The lane labeled MW corresponds to a molecular weight ladder. The “ins” and “trypsin” lanes are control lanes containing insulin and trypsin, respectively.

[0031] FIG. 7 shows blood glucose levels in female Balb/c mice, 7 weeks-old, which were left without food intake for 2 hours and then received the indicated doses of insulin. FIG. 7A shows blood glucose levels after LANTUS® administration; whereas FIG. 7B shows blood glucose levels after NOVORAPID® administration. The insulins were administered orally at 1 IU, 5 IU, and 50 IU doses. PBS and a subcutaneous administration of insulin at 1-5 IU were used as controls. 1 IU seemed to be a suboptimal dose for both insulins (circled).

[0032] FIG. 8 shows blood glucose levels in female Balb/c mice, 7 weeks-old, which were left without food intake for 2 hours and then received the indicated doses of insulin, alone or combined with a VSP carrier. FIG. 8A shows blood glucose levels after LANTUS® administration; whereas FIG. 8B shows blood glucose levels after NOVORAPID® administration. The insulins were administered at the suboptimal dose identified in FIG. 7 (1 IU) in three different formulations (i) insulin administered alone, (ii) insulin combined with VSP at a 1:1 molecule to molecule ratio, and (iii) insulin combined with VSP at a 1:3 molecule to molecule ratio. PBS and a subcutaneous administration of insulin at 1-5 IU were used as controls. The combination of 1 IU of insulin with a VSP carrier enhanced insulin's biological action, at a 1:1 insulin to VSP carrier ratio for LANTUS® and at a 1:3 insulin to VSP carrier ratio for NOVORAPID® (circled).

[0033] FIG. 9 shows the specificity of the anti-hGH monoclonal antibody (α HCB) by Western blot. Two dilutions of the monoclonal a HCB (1/3000 and 1/2000) were used to detect hGH (HCB: human growth hormone produced in transgenic bovines). A control containing an anti-alkaline phosphatase antibody (a Mouse-AP1) is also shown.

[0034] FIG. 10A shows the effect of pH on the stability of hGH. The top image is a Western blot showing the pH-mediated degradation of hGH incubated in medium at pH 1.6, 2.0, 3.8, 5.0, 5.8, 7.0, 8.0, 9.0, 10.0, and 11.0. The presence of hGH was determined using an anti-hGH monoclonal antibody. The bottom image shows the silver staining detection of hGH. Low pHs, similar to those found in the GIT, caused degradation of the protein (circles), while at higher pHs the hGH remained unaltered as compared with the control. Each lane contained 10 μg of hGH.

[0035] FIG. 10B shows the effect of combining a VSP carrier with hGH on the hGH denaturation at low pH. The Western blots correspond to pairs of samples in which hGH samples without a VSP carrier or with a VSP carrier at a 1:3 hGH to VSP carrier ratio were subjected to the same pH conditions (pH 1.4, 1.96, 3.8, 4.91, 5.9, 7.01, 7.95, 8.51, 9.61, and 11.17). The hGH:VSP carrier sample at pH 3.8 was lost during processing. The presence of hGH was determined using an anti-hGH monoclonal antibody.

[0036] FIG. 11A shows the effect of trypsin on the stability of hGH. The top image is a Western blot staining using an anti-hGH monoclonal antibody. The bottom image corresponds to silver staining. Trypsin completely proteolyzed hGH as indicated by the circled areas.

[0037] FIG. 11B shows that combining a VSP carrier with hGH at a 1:3 hGH to VSP ratio protects hGH from trypsin degradation up to 150 μg/ml trypsin. The Western blots correspond to pairs of samples in which hGH samples without a VSP carrier, or with a VSP carrier at a 1:3 hGH to VSP carrier ratio were subjected to the same trypsin concentrations (50, 100, 150, 300 and 500 μg/ml). The presence of hGH was determined using an anti-hGH monoclonal antibody.

[0038] FIG. 12A shows in its main panel the serum levels of hGH in mice after oral administration of the specified hGH doses (50, 100, 200, 400 and 800 μg). The inset shows the serum levels of hGH in mice after subcutaneous administration of a 12.5 μg dose of hGH.

[0039] FIG. 12B shows serum levels of hGH in mice after oral administration of hGH alone or in combination with a VSP carrier at a 1:3 hGH to VSP carrier ratio.

[0040] FIG. 13A shows the effect of trypsin on the stability of glucagon. The top panel of the Dot blot shows Trypsin proteolyzed glucagon. The bottom panel shows that combining a VSP carrier with glucagon at a 1:3 glucagon to VSP ratio protects glucagon from trypsin degradation up to 1:2 (protein:protease) ratio.

[0041] FIG. 13B shows the effect on blood glucose levels resulting from oral administration of glucagon alone or combined with VSP to BALC/c mice.

### DETAILED DESCRIPTION

[0042] Oral delivery of bioactive peptides such as insulin, glucagon, or growth hormone, which generally are administered via injection, offers considerable benefits in terms of decreased number of injections, improved compliance, and reduced incidence of side effects. However, successful oral delivery of therapeutic agents, e.g., bioactive peptides such as insulin, glucagon, or human growth hormone (hGH), involves overcoming the barriers of enzymatic degradation, achieving epithelial permeability, and taking steps to conserve bioactivity during the formulation process. To address this problem, we provide an oral delivery system in which bioactive peptides, e.g., insulin, glucagon, or hGH, are combined with, but not covalently combined via peptide bonds, with a VSP carrier to protect the bioactive peptides from degradation in the gastrointestinal track (GIT) and to promote its systemic biological action.

Accordingly, the present disclosure is directed to therapeutic compositions comprising VSP carriers (e.g., Giardia VSPs, VSP-like proteins, fragments, variants, or derivatives thereof) comprising at least one CXXC motif, wherein C represents a cysteine amino acid and X represents any amino acid, which can be combined and bind to therapeutic agents and function as carriers for drug delivery. The disclosure relates in particular to compositions comprising VSP carriers, e.g., polypeptides derived from the extracellular domain of Giardia VSP, which are resistant to proteases and different pHs, and which are able to attach to epithelial cells in the GIT. In some embodiments, such VSP carriers are used to form Virus-Like-Particles (VLPs) suitable to be administered orally.

[0043] The combination of therapeutic agents with VSP carriers for oral or mucosal administration confers to such therapeutic agents increased resistance to pH-induced degradation and enzymatic degradation, as well as increasing the binding of such therapeutic agents to the gastrointestinal epithelium. In some specific aspects, the therapeutics agents are bioactive peptides such as insulins, glucagon, or human growth hormone.

### DEFINITIONS

[0044] It must be noted that, as used in this specification and the appended claims, the singular forms “a,” “an” and “the” include plural referents unless the context clearly dictates otherwise. The terms “a” (or “an”), as well as the terms “one or more,” and “at least one” can be used interchangeably herein.

[0045] Furthermore, “and/or” where used herein is to be taken as specific disclosure of each of the two specified features or components with or without the other. Thus, the term “and/or” as used in a phrase such as “A and/or B” herein is intended to include “A and B,” “A or B,” “A,” (alone) and “B” (alone). Likewise, the term “and/or” as used in a phrase such as “A, B, and/or C” is intended to encompass each of the following embodiments: A, B, and C; A, B, or C; A or C; A or B; B or C; A and C; A and B; B and C; A (alone); B (alone); and C (alone).

[0046] Unless defined otherwise, all technical and scientific terms used herein have the same meaning as commonly understood by one of ordinary skill in the art to which this invention is related. For example, the Concise Dictionary of Biomedicine and Molecular Biology, Juo, Pei-Show, 2nd ed., 2002, CRC Press; The Dictionary of Cell and Molecular Biology, 3rd ed., 1999, Academic Press; and the Oxford Dictionary Of Biochemistry And Molecular Biology, Revised, 2000, Oxford University Press, provide one of skill with a general dictionary of many of the terms used in this disclosure.

[0047] Units, prefixes, and symbols are denoted in their Système International de Unites (SI) accepted form. Numeric ranges are inclusive of the numbers defining the range. Unless otherwise indicated, amino acid sequences are written left to right in amino to carboxy orientation. The headings provided herein are not limitations of the various aspects or embodiments of the invention, which can be had by reference to the specification as a whole. Accordingly, the terms defined immediately below are more fully defined by reference to the specification in its entirety.

[0048] It is understood that wherever embodiments are described herein with the language “comprising,” otherwise analogous embodiments described in terms of “consisting of” and/or “consisting essentially of” are also provided.

[0049] Amino acids are referred to herein by either their commonly known three letter symbols or by the one-letter symbols recommended by the IUPAC-IUB Biochemical Nomenclature Commission. Nucleotides, likewise, are referred to by their commonly accepted single-letter codes.

[0050] As used herein, the terms “Giardia” or “Giardia parasite” refer to a genus of anaerobic flagellated protozoan parasites of the phylum Metamonada that colonize and reproduce in the small intestines of several vertebrates, causing giardiasis. World-wide, giardiasis is common among people with poor fecal-oral hygiene, and major modes of transmission include contaminated water supplies or sexual activity. Flagellated Giardia trophozoites attach to epithelial cells of the small intestine (i.e., the surface of the intestinal mucosa), where they can cause disease without triggering a pronounced inflammatory response (Rivero et al., Nat. Med. 16(5):551-7 (2010)). There are no known virulence factors or toxins, and variable expression of surface proteins allows evasion of host immune responses and adaptation to different host environments (Rivero et al., Nat. Med. 16(5):551-7 (2010)). Their life cycle alternates between an actively swimming trophozoite and an infective, resistant cyst. The Giardia parasite infects humans, but is also one of the most common parasites infecting cats, dogs and birds. Mammalian hosts also include cows, beavers, deer, and sheep.

[0051] The term “Giardia” encompasses different species, including Giardia lamblia and Giardia muris. As used herein, the term “Giardia lamblia” (also called Giardia intestinalis or Giardia duodenalis) refers to one of the most common intestinal parasites of humans. Giardia lamblia is the most prevalent parasitic protist in the United States, where its incidence may be as high as 0.7% (Hlaysa et al., MMWR Surveill. Summ. 54:9-16 (2005)).

[0052] As used herein, the terms “variable surface protein,” “VSP protein,” or “VSP” refer to polypeptides that cover the entire surface of the Giardia parasite and are the major antigens recognized by the host immune system. The term “VSP” as defined herein also includes homologs, e.g., orthologs and paralogs of “VSP” proteins from Giardia, VSP and VSP-like proteins found in other organisms, as well as fragments, variants, and derivatives thereof.

[0053] The term “homolog,” used with respect to a VSP protein or VSP-encoding gene of a first family or species, refers to distinct VSP protein or VSP-encoding genes of a second family or species which are determined by functional, structural, or genomic analyses to be an VSP protein or VSP-encoding gene of the second family or species which corresponds to the original VSP protein or VSP-encoding gene of the first family or species. As used herein, the term “homolog” refers to any VSP protein or VSP-encoding gene that is related to a reference VSP protein or VSP-encoding gene by descent from a common ancestral DNA sequence. The term homolog includes both orthologs and paralogs.

[0054] The term “ortholog” refers to VSP homologs in different species that evolved from a common ancestral gene by speciation. Typically, orthologs retain the same or similar function despite differences in their primary structure (mutations).

[0055] The term “paralog” refers to VSP homologs in the same species that evolved by genetic duplication of a common ancestral gene. In many cases, paralogs exhibit related (but not always identical functions). To the extent that a particular species has evolved multiple related genes from an ancestral DNA sequence shared with another species, the term ortholog can encompass the term paralog.

[0056] Most often, homologs will have functional, structural, or genomic similarities. Techniques are known by which homologs of an enzyme or gene can readily be cloned using genetic probes and PCR. Identity of cloned sequences as homologs can be confirmed using functional assays and/or by genomic mapping of the genes.

[0057] VSP proteins are cysteine-rich proteins with multiple CXXC motifs (where X is any amino acid) that have several particular characteristics, including in some VSP the presence of CXC motifs, a Giardia-specific Zinc-finger motif, and GGCY motifs (Nash, Mol. Microbiol. 45:585-590 (2002); Adam et al., BMC Genomics 10:424 (2010)). More precisely, VSP proteins are type 1 integral membrane proteins that vary in size from 20 to 200 kDa; possess a variable amino-terminal cysteine-rich region (extracellular domain that represents the host/parasite interface and confers to the protein resistance to proteolytic digestion and low pH), and a conserved carboxy-terminal region that includes a hydrophobic transmembrane region and a short cytosolic tail comprising only 5 amino acids (CRGKA), which are not “seen” by the immune system. Only one VSP protein is expressed at any given time on the surface of each parasite (Nash. Philos. Trans. R. Soc. Lond. B. Biol. Sci. 352:1369-1375 (1997)).

[0058] Within the context of the present invention, the terms “variable surface protein,” “VSP protein,” or “VSP” includes any variable surface protein of the complete repertoire of Giardia VSP proteins, notably Giardia lamblia. Actually, Giardia parasites encodes a repertoire of about 200 genes encoding VSPs for VSP assemblage A (see, e.g., Morrison et al., Science 317:1921-1926 (2010); Adam et al., BMC Genomics 10:424 (2010)), and two reports of Svard's group describing the VSP repertoire of isolates derived from VSP assemblages B and E (Jerlstrom-Hultqvist et al. BMC Genomics 11:543 (2010); Franzen et al. PLoS Pathog. 5(8):c1000560 (2009)). The extracellular domain of a VSP allows the parasite to survive the hostile environment of the upper small intestine. VSPs are very resistant to variable pHs (reactivity to a conformational epitope by a monoclonal antibody directed to a particular VSP remains unaltered between pH 2 and 12), and digestion by trypsin and several other proteases. In addition, VSPs remain attached to the enteric mucosa after the trophozoites have attached to it (Rivero et al., Nat. Med. 16(5):551-7 (2010)). A comprehensive list of VSP proteins can be found at www.ebi.ac.uk/interpro/IEntry?ac=IPR005127.

[0059] It must be further noted that polypeptides comprising at least one CXXC motif, wherein C represents a cysteine residue and X any amino acid residue, such as Giardia VSPs or VSP-like proteins of other microorganisms may also be generated in vitro by genetic manipulation and produced in heterologous systems. Therefore, chemically- or cell-produced polypeptides, including those with amino acid variations not found in the wild type parasites (for instance variants of Giardia VSPs) are encompassed. VSPs may thus be prepared by any well-known procedure in the art, such as solid phase synthesis, liquid phase synthesis or genetic engineering.

[0060] VSPs used in the therapeutic compositions of the invention can undergo chemical modifications. Chemical modifications can be aimed at obtaining VSPs with increased protection against enzymatic degradation in vivo, and/or increased capacity to cross membrane barriers, thus increasing their half-lives and maintaining or improving their biological activity. Any chemical modification known in the art can be employed according to the present invention to modify a VSP. Such chemical modifications include but are not limited to:
[0061] (a) modifications to the N-terminal and/or C-terminal ends of the VSP proteins such as e.g., N-terminal acylation (preferably acetylation) or desamination, or modification of the C-terminal carboxyl group into an amide or an alcohol group;
[0062] (b) modifications at the amide bond between two amino acids: acylation (preferably acetylation) or alkylation (preferably methylation) at the nitrogen atom or the alpha carbon of the amide bond linking two amino acids;
[0063] (c) modifications at the alpha carbon of the amide bond linking two amino acids such as, e.g., acylation (preferably acetylation) or alkylation (preferably methylation) at the alpha carbon of the amide bond linking two amino acids.
[0064] (d) chirality changes such as, e.g., replacement of one or more naturally occurring amino acids (L enantiomer) with the corresponding D-enantiomers;
[0065] (e) retro-inversions in which one or more naturally-occurring amino acids (L-enantiomer) are replaced with the corresponding D-enantiomers, together with an inversion of the amino acid chain (from the C-terminal end to the N-terminal end); and/or
[0066] (f) azapeptides wherein one or more alpha carbons are replaced with nitrogen atoms.

[0067] The terms “protein” and “polypeptide,” (e.g., a VSP protein) are used interchangeably to refer to a molecule composed of monomers (amino acids) linearly linked by amide bonds (also known as peptide bonds). Peptides, dipeptides, tripeptides, or oligopeptides are included within the definition of “polypeptide,” and the term “polypeptide” can be used instead of, or interchangeably with any of these terms. The term “polypeptide” is also intended to refer to the products of post-expression modifications of the polypeptide, including without limitation glycosylation, acetylation, phosphorylation, amidation, derivatization by known protecting/blocking groups, proteolytic cleavage, or modification by non-naturally occurring amino acids. A polypeptide can be isolated from a natural biological source or produced by recombinant technology, but is not necessarily translated from a designated nucleic acid sequence. A polypeptide can be generated in any manner, including by chemical synthesis.

[0068] The terms “protein” or “polypeptide” (e.g., a VSP protein) also include variants which would encompass any polypeptide comprising any natural or genetically engineered polypeptide having at least about 70%, at least about 80%, at least about 90%, at least about 95%, or at least 99% amino acid sequence identity with the sequence of the polypeptide. Variant polypeptides can be generated using genetic engineered, e.g., by insertion, substitution, deletion, or a combination thereof. Substitutions in a protein sequence of the invention can be conservative or non-conservative.

[0069] When the term “variant of a protein” applies, according to the present invention, to the Giardia VSP or VSP-like protein of other microorganisms, such variant should be able of retaining the ability to attach to cells, particularly to mucosal cells, more particularly to epithelial cells of the GIT and functioning as a therapeutic agent carrier. Variants can be naturally or non-naturally occurring. Non-naturally occurring variants can be produced using art-known mutagenesis techniques. Variant polypeptides can comprise conservative or non-conservative amino acid substitutions, deletions or additions

[0070] As used here, when the term “fragment” applies to a VSP or VSP-like protein of other microorganism (e.g., in the phrases “a fragment of a VSP” or a “VSP or a fragment thereof”) such fragment should encompass any polypeptide comprising at least about 5, 6, 7, 8, 9, 10, 11, 12, 13, 14, 15, 16, 17, 18, 19, 20, 25, 30, 40, 50, 60, 70, 80, 90, 100, 150, 200, 300, 400, or 500 contiguous or discontinuous amino acids of the protein or polypeptide as defined herein, as well as any polypeptide. Such fragment should be capable of retaining the ability to attach to cells, particularly to mucosal cell, more particularly to epithelial cells of the GIT and functioning as a therapeutic agent carrier.

[0071] “Derivatives” of polypeptides or proteins of the invention are polypeptides or proteins which have been altered so as to exhibit additional features not found on the native polypeptide or protein, but still display the beneficial properties of the parent polypeptide or protein (e.g., resistance to proteolytic enzyme degradation or binding to gastrointestinal epithelial cells).

[0072] An “isolated” polypeptide, protein, or a fragment, variant, or derivative thereof refers to a polypeptide or protein that is not in its natural milieu. No particular level of purification is required. For example, an isolated polypeptide or protein can simply be removed from its native or natural environment. A “recombinant” polypeptide or protein refers to a polypeptide or protein produced via recombinant DNA technology. Recombinantly produced polypeptides and proteins expressed in host cells are considered isolated for the purpose of the invention, as are native or recombinant polypeptides which have been separated, fractionated, or partially or substantially purified by any suitable technique.

[0073] A “protein sequence” or “amino acid sequence” means a linear representation of the amino acid constituents in a polypeptide in an amino-terminal to carboxyl-terminal direction in which residues that neighbor each other in the representation are contiguous in the primary structure of the polypeptide.

[0074] A “conservative amino acid substitution” is one in which the amino acid residue is replaced with an amino acid residue having a similar side chain Families of amino acid residues having similar side chains have been defined in the art, including basic side chains (e.g., lysine, arginine, histidine), acidic side chains (e.g., aspartic acid, glutamic acid), uncharged polar side chains (e.g., glycine, asparagine, glutamine, serine, threonine, tyrosine, cysteine), nonpolar side chains (e.g., alanine, valine, leucine, isoleucine, proline, phenylalanine, methionine, tryptophan), beta-branched side chains (e.g., threonine, valine, isoleucine) and aromatic side chains (e.g., tyrosine, phenylalanine, tryptophan, histidine). Thus, if an amino acid in a polypeptide is replaced with another amino acid from the same side chain family, the substitution is considered to be conservative. In another embodiment, a string of amino acids can be conservatively replaced with a structurally similar string that differs in order and/or composition of side chain family members.

[0075] The term “percent sequence identity” between two polynucleotide or polypeptide sequences refers to the number of identical matched positions shared by the sequences over a comparison window, taking into account additions or deletions (i.e., gaps) that must be introduced for optimal alignment of the two sequences. A matched position is any position where an identical nucleotide or amino acid is presented in both the target and reference sequence. Gaps presented in the target sequence are not counted since gaps are not nucleotides or amino acids. Likewise, gaps presented in the reference sequence are not counted since target sequence nucleotides or amino acids are counted, not nucleotides or amino acids from the reference sequence.

[0076] The percentage of sequence identity is calculated by determining the number of positions at which the identical amino-acid residue or nucleic acid base occurs in both sequences to yield the number of matched positions, dividing the number of matched positions by the total number of positions in the window of comparison and multiplying the result by 100 to yield the percentage of sequence identity. The comparison of sequences and determination of percent sequence identity between two sequences may be accomplished using readily available software both for online use and for download. Suitable software programs are available from various sources, and for alignment of both protein and nucleotide sequences. One suitable program to determine percent sequence identity is bl2seq, part of the BLAST suite of program available from the U.S. government's National Center for Biotechnology Information BLAST web site (blast.ncbi.nlm.nih.gov). Bl2seq performs a comparison between two sequences using either the BLASTN or BLASTP algorithm. BLASTN is used to compare nucleic acid sequences, while BLASTP is used to compare amino acid sequences. Other suitable programs are, e.g., Needle, Stretcher, Water, or Matcher, part of the EMBOSS suite of bioinformatics programs and also available from the European Bioinformatics Institute (EBI) at www.ebi.ac.uk/Tools/psa.

[0077] Different regions within a single polynucleotide or polypeptide target sequence that aligns with a polynucleotide or polypeptide reference sequence can each have their own percent sequence identity. It is noted that the percent sequence identity value is rounded to the nearest tenth. For example, 80.11, 80.12, 80.13, and 80.14 are rounded down to 80.1, while 80.15, 80.16, 80.17, 80.18, and 80.19 are rounded up to 80.2. It also is noted that the length value will always be an integer.

[0078] One skilled in the art will appreciate that the generation of a sequence alignment for the calculation of a percent sequence identity is not limited to binary sequence-sequence comparisons exclusively driven by primary sequence data. Sequence alignments can be derived from multiple sequence alignments. One suitable program to generate multiple sequence alignments is ClustalW2, available from www.clustal.org. Another suitable program is MUSCLE, available from www.drive5.com/muscle/. ClustalW2 and MUSCLE are alternatively available, e.g., from the EBI.

[0079] It will also be appreciated that sequence alignments can be generated by integrating sequence data with data from heterogeneous sources such as structural data (e.g., crystallographic protein structures), functional data (e.g., location of mutations), or phylogenetic data. A suitable program that integrates heterogeneous data to generate a multiple sequence alignment is T-Coffee, available at www.tcoffee.org, and alternatively available, e.g., from the EBI. It will also be appreciated that the final alignment used to calculated percent sequence identity may be curated either automatically or manually.

[0080] The terms “heterologous moiety” mean that a polynucleotide, polypeptide, non-peptidic polymer or other moiety is derived from a distinct entity from that of the entity to which it is being compared. For instance, a heterologous polypeptide can be synthetic, or derived from a different species, different cell type of an individual, or the same or different type of cell of distinct individuals. In one aspect, a heterologous moiety can be a polypeptide fused to another polypeptide to produce a fusion polypeptide or protein. In another aspect, a heterologous moiety can be a non-polypeptide. In some embodiments, the VSP carrier comprises a heterologous moiety, e.g., a His6 tag for protein purification. In other embodiments, therapeutic agents that are combined with VSP carriers provided herein can be conjugated or fused (recombinantly, or using protein synthesis or chemical conjugation methods) to at least one heterologous moiety, e.g., polyethylene glycol (PEG), to improve a pharmacokinetic and/or pharmacodynamics property (e.g., in vivo half-life). Heterologous moieties capable of increasing the in vivo half-life of therapeutic agents are known in the art.

[0081] The term “increased” with respect to a functional characteristic of a therapeutic agent such as resistance to degradation caused by high or low pH, resistance to enzymatic degradation (e.g., proteolytic degradation), or binding to target cells (e.g., gastrointestinal epithelial cells) is used to indicate that the relevant functional characteristic is increased relative to that of a reference (for example the therapeutic agent administered in the absence of a VSP carrier), as determined under comparable conditions.

[0082] In some embodiments, the increase in the functional characteristic of the therapeutic agent (e.g., resistance to enzymatic degradation in the GIT) is, e.g., at least about 5%, at least about 10%, at least about 15%, at least about 20%, at least about 25%, at least about 30%, at least about 35%, at least about 40%, at least about 45%, at least about 50%, at least about 55%, at least about 60%, at least about 65%, at least about 70%, at least about 75%, at least about 80%, at least about 85%, at least about 90%, at least about 95%, at least about 96%, at least about 97%, at least about 98%, or at least about 99% higher relative to a reference (for example resistance to enzymatic degradation of the therapeutic agent, e.g., insulin, in the GIT in the absence of a VSP carrier), as determined under comparable conditions.

[0083] In some embodiments, the increase in the functional characteristic of the therapeutic agent (e.g., resistance to enzymatic degradation in the GIT) is, e.g., an at least about 2-fold, at least about 3-fold, at least about 4-fold, at least about 5-fold, at least about 6-fold, at least about 7-fold, at least about 8-fold, at least about 9-fold, at least about 10-fold, at least about 20-fold, at least about 30-fold, at least about 40-fold, at least about 50-fold, at least about 60-fold, at least about 70-fold, at least about 80-fold, at least about 90-fold, or at least about 100-fold increase relative to a reference (for example when compared to the resistance to enzymatic degradation of the therapeutic agent, e.g., insulin, in the GIT in the absence of a VSP carrier), as determined under comparable conditions.

[0084] The term “decreased” with respect to a functional characteristic of a therapeutic agent such as resistance to degradation caused by high or low pH, resistance to enzymatic degradation (e.g., proteolytic degradation), or binding to target cells (e.g., gastrointestinal epithelial cells) is used to indicate that the relevant functional characteristic is decreased relative to that of a reference (for example the therapeutic agent administered in the absence of a VSP carrier), as determined under comparable conditions.

[0085] In some embodiments, the decrease in the functional characteristic of the therapeutic agent (e.g., resistance to enzymatic degradation in the GIT) is, e.g., at least about 5%, at least about 10%, at least about 15%, at least about 20%, at least about 25%, at least about 30%, at least about 35%, at least about 40%, at least about 45%, at least about 50%, at least about 55%, at least about 60%, at least about 65%, at least about 70%, at least about 75%, at least about 80%, at least about 85%, at least about 90%, at least about 95%, at least about 96%, at least about 97%, at least about 98%, or at least about 99% lower relative to a reference (for example resistance to enzymatic degradation of the therapeutic agent, e.g., insulin, in the GIT in the presence of a VSP carrier), as determined under comparable conditions.

[0086] In some embodiments, the decrease in the functional characteristic of the therapeutic agent (e.g., resistance to enzymatic degradation in the GIT) is, e.g., at least about 2-fold, at least about 3-fold, at least about 4-fold, at least about 5-fold, at least about 6-fold, at least about 7-fold, at least about 8-fold, at least about 9-fold, at least about 10-fold, at least about 20-fold, at least about 30-fold, at least about 40-fold, at least about 50-fold, at least about 60-fold, at least about 70-fold, at least about 80-fold, at least about 90-fold, or at least about 100-fold lower relative to a reference (for example when compared to the resistance to enzymatic degradation of the therapeutic agent, e.g., insulin, in the GIT in the presence of a VSP carrier), as determined under comparable conditions.

[0087] The term “polynucleotide” or “nucleotide” is intended to encompass a singular nucleic acid as well as plural nucleic acids, and refers to an isolated nucleic acid molecule or construct, e.g., messenger RNA (mRNA) or plasmid DNA (pDNA). In certain embodiments, a polynucleotide comprises a conventional phosphodiester bond or a non-conventional bond (e.g., an amide bond, such as found in peptide nucleic acids (PNA)).

[0088] The term “nucleic acid” refers to any one or more nucleic acid segments, e.g., DNA or RNA fragments, present in a polynucleotide. By “isolated” nucleic acid or polynucleotide is intended a nucleic acid molecule, DNA or RNA, which has been removed from its native environment. For example, a recombinant polynucleotide encoding a VSP polypeptide contained in a vector is considered isolated for the purposes of the present invention. Further examples of an isolated polynucleotide include recombinant polynucleotides maintained in heterologous host cells or purified (partially or substantially) from other polynucleotides in a solution. Isolated RNA molecules include in vivo or in vitro RNA transcripts of polynucleotides of the present invention. Isolated polynucleotides or nucleic acids according to the present invention further include such molecules produced synthetically. In addition, a polynucleotide or a nucleic acid can include regulatory elements such as promoters, enhancers, ribosome binding sites, or transcription termination signals.

[0089] As used herein, a “coding region” or “coding sequence” is a portion of polynucleotide which consists of codons translatable into amino acids. Although a “stop codon” (TAG, TGA, or TAA) is typically not translated into an amino acid, it may be considered to be part of a coding region, but any flanking sequences, for example promoters, ribosome binding sites, transcriptional terminators, introns, and the like, are not part of a coding region. The boundaries of a coding region are typically determined by a start codon at the 5′ terminus, encoding the amino terminus of the resultant polypeptide, and a translation stop codon at the 3′ terminus, encoding the carboxyl terminus of the resulting polypeptide. Two or more coding regions of the present invention can be present in a single polynucleotide construct, e.g., on a single vector, or in separate polynucleotide constructs, e.g., on separate (different) vectors. It follows, then, that a single vector can contain just a single coding region, or comprise two or more coding regions, e.g., a single vector can separately encode a binding domain-A and a binding domain-B as described below. In addition, a vector, polynucleotide, or nucleic acid of the invention can encode heterologous coding regions, either fused or unfused to a nucleic acid encoding a binding domain of the invention. Heterologous coding regions include without limitation specialized elements or motifs, such as a secretory signal peptide or a heterologous moiety (e.g., a His6 tag).

[0090] Certain proteins secreted by eukaryotic cells are associated with a secretory signal peptide which is cleaved from the mature protein once export of the growing protein chain across the rough endoplasmic reticulum has been initiated. Those of ordinary skill in the art are aware that signal peptides are generally fused to the N-terminus of the polypeptide, and are cleaved from the complete or “full-length” polypeptide to produce a secreted or “mature” form of the polypeptide. In certain embodiments, a native signal peptide is used, or a functional derivative of that sequence that retains the ability to direct the secretion of the polypeptide that is operably associated with it. Alternatively, a heterologous signal peptide, e.g., a human tissue plasminogen activator (TPA) or mouse β-glucuronidase signal peptide, or a functional derivative thereof, can be used.

[0091] As used herein, the term “host cell” refers to a cell or a population of cells harboring or capable of harboring a recombinant nucleic acid. Host cells can be a prokaryotic cells (e.g., E. coli), or alternatively, the host cells can be eukaryotic, for example, fungal cells (e.g., yeast cells such as Saccharomyces cerivisiae, Pichia pastoris, or Schizosaccharomyces pombe), and various animal cells, such as insect cells (e.g., Sf-9) or mammalian cells (e.g., HEK293F, CHO, COS-7, NIH-3T3).

[0092] The term “therapeutic agent” refers to any therapeutically active substance that is delivered to a subject, e.g., orally, to produce a desired beneficial effect such as preventing, inhibiting, or arresting the symptoms and/or progression of a disease or condition. In some embodiments, a therapeutic agent can be preformulated, e.g., as a microcapsule, microsphere, microbubble, liposome, nisome, emulsion, dispersion, etc., before it is combined with the VSP carrier. Also included in the definition of therapeutic agent are diagnostically active agents and imaging agents such as dyes or fluorescent markers.

[0093] As used herein, the term “pharmaceutically acceptable” means approved by a regulatory agency of U.S. or E.U. or other government or listed in the U.S. Pharmacopeia or other generally recognized pharmacopeia for use in humans. Hence, the term “pharmaceutically acceptable” refers to those properties and/or substances that are acceptable to a patient (e.g., a human patient) from a toxicological and/or safety point of view.

[0094] The terms “pharmaceutically acceptable excipient” and “pharmaceutically acceptable carrier” refer to excipients and carriers used in pharmaceutical compositions which do not have a significant detrimental impact on the treated host and which retain the therapeutic properties of the therapeutic agent with which it they are administered. One exemplary physiologically acceptable carrier is physiological saline. Other physiologically acceptable carriers and their formulations are known to one skilled in the art and are described, for example, in Remington's Pharmaceutical Sciences, (18^{t5} edition), ed. A. Gennaro, 1990, Mack Publishing Company, Easton, Pa., incorporated herein by reference.

[0095] The phrase “effective amount” as used herein refers to that amount of a therapeutic composition of the invention, comprising a combination of a therapeutic agent with a VSP carrier, or a pharmaceutical composition comprising such therapeutic composition which is effective for producing a desired effect, at a reasonable benefit/risk ratio applicable to any medical treatment. For example, an “effective amount” is an amount effective to reduce or lessen at least one symptom of the disease or disorder being treated or to reduce or delay onset of one or more clinical markers or symptoms associated with the disease or disorder, or to modify or reverse the disease process.

[0096] The terms “treat” or “treatment” as used herein refer to both therapeutic treatment and prophylactic or preventative measures, wherein the object is to prevent or slow down (lessen) an undesired physiological change or disorder in a subject, such as the progression of an hormone deficiency-related disease or condition. Beneficial or desired clinical results include, but are not limited to, alleviation of symptoms, diminishment of extent of disease, stabilized (i.e., not worsening) state of disease, delay or slowing of disease progression, amelioration or palliation of the disease state, and remission (whether partial or total), whether detectable or undetectable.

[0097] The term “treatment” also means prolonging survival as compared to expected survival if not receiving treatment. Those in need of treatment include those already with the condition or disorder as well as those prone to have the condition or disorder or those in which the condition or disorder is to be prevented.

[0098] The term “administering,” as used herein, means to give a therapeutic composition of the invention comprising a therapeutic agent combined with a VSP carrier, or pharmaceutical composition comprising the therapeutic composition of the invention, to a subject (e.g., human subject) in need thereof via a pharmaceutically acceptable route of administration. In some embodiments, the route of administration is oral or mucosal. In other embodiments, the route of administration is selected from subcutaneous, intramuscular, nasal, intravenous, and pulmonary administration. A VSP carrier can be administered as part of a pharmaceutical composition comprising at least one therapeutic agent and at least one pharmaceutically acceptable excipient.

[0099] The terms “subject” and “patient” are used interchangeably and refer to any individual, patient or animal, in particularly a mammalian subject, for whom diagnosis, prognosis, or therapy is desired. Mammalian subjects include humans, domestic animals, farm animals, and zoo, sports, or pet animals such as dogs, cats, guinea pigs, rabbits, rats, mice, horses, cattle, cows, etc.

### Introduction

[0100] This disclosure provides therapeutic compositions comprising a VSP carrier and a therapeutic agent. VSP carriers are polypeptides such as variant-specific surface proteins (VSPs) of the intestinal parasite Giardia lamblia and VSP-like proteins from other organisms which can bind to therapeutic agents, e.g., bioactive peptides, and effectively deliver such therapeutic agents by the oral or mucosal route. To determine whether VSPs, due to their resistance to degradation by acidic pH, resistance to proteolytic degradation, and adherence to the intestinal mucosa, can effectively be combined with therapeutic agents (e.g., bioactive peptide) and be used as carriers to transport therapeutic agents through the gastro intestinal tract (GIT), we have used three bioactive peptides, insulin, glucagon, and human growth hormone, as prototype therapeutic agents to be delivered by the oral route.

[0101] The results disclosed herein in the Examples section indicate that VSP carriers can be used to effectively deliver therapeutic agents orally, or by other delivery routes (e.g., mucosal administration) where proteolytic degradation and/or exposure to low pH could affect the integrity of the therapeutic agent.

[0102] The term “VSP carrier” as used herein refers to a VSP protein (e.g., a Giardia VSP, a VSP-like protein, a VSP or VSP-like protein fragment, a VSP or VSP-like protein variant, a VSP or VSP-like protein derivative, or a combination of two or more of said VSP polypeptides) which can bind to at least one therapeutic agent. In certain embodiments, the at least one therapeutic agent is not a vaccine immunogen.

[0103] The VSP carriers of the invention are not covalently bound to the therapeutic agents via peptidic bonds. Thus, the term “bound” and its grammatical variants (e.g., “bind,” “binds,” “binding,” etc.) when applied to the interaction between a VSP carrier and a therapeutic agent refers to (i) covalent non-peptide binding (e.g., binding via a disulphide bond) or (ii) non-covalent binding, but not to peptide-bond formation between the VSP carrier and a therapeutic agent.

[0104] Non-limiting examples of non-covalent binding between a VSP carrier and a therapeutic agent include an ionic bond (e.g., cation-pi bond or salt bond), a metal bond, an hydrogen bond (e.g., dihydrogen bond, dihydrogen complex, low-barrier hydrogen bond, or symmetric hydrogen bond), van der Waals force, London dispersion force, a mechanical bond, a halogen bond, aurophilicity, intercalation, stacking, entropic force, or chemical polarity.

[0105] The term “bound” also refers to the enclosement, or partial enclosement of a therapeutic agent (e.g., a bioactive peptide such as insulin) by a molecular structure that comprises a VSP carrier. In some embodiments, the term “bound” refers to the interaction (covalent or non-covalent) of a VSP carrier with a macromolecular structure in which a therapeutic agent is enclosed. In this respect, the therapeutic agent can be enclosed or packaged, e.g., in a lipid bilayer, liposome, nanoparticle, nanotube, nanobubble, micelle, nanosphere, nanoshell, nanorod, chemical cage, nanohorn, quantum dot, nanocluster, microbubble, dendrimer, aquasome, lipopolyplex, nanoemulsion, or a combination thereof. The term “bound” also includes binding of a VSP carrier to a lipid bilayer or insertion of a VSP carrier into a lipid bilayer which either comprises the therapeutic agent (e.g., a liposoluble drug inserted in the bilayer's hydrophobic core) or encloses the therapeutic agent (e.g., the lipid bilayer is part of a liposome in which the therapeutic agent is packaged).

[0106] In some embodiments, the VSP carrier comprises a heterogous moiety genetically fused to a hydrophobic peptide that anchors the VSP carrier the bilayer. In other embodiments, a heterologous moiety that anchors the VSP carrier to the bilayer (e.g., a hydrophobic peptide or a lipid anchor) can be chemically conjugated to the VSP carrier. In some embodiments, the VSP carrier can be genetically fused or conjugated to a heterologous moiety by a linker. The term “linker” refers to a molecular entity that covalently links a VSP carrier and a heterologous moiety. The linker can comprises, for example, a thiol group, an alkyl group, a glycol group, or a peptide group. Linkers include cross-linking molecules. See, e.g., Int. Pat. Publ. No. WO 2004/009116 which is incorporated herein by reference in its entirety.

[0107] In some embodiments, the VSP carrier is bound to the therapeutic agent by forming a “virus-like particle” (VLP) which comprises the therapeutic agent (either on the surface of the VLP or encapsulated in the VLP). As used herein, the term “virus-like particle” or “VLP” refers to a structure resembling a virus particle that displays a Giardia VSP or a fragment thereof at its surface. A virus-like particle in accordance with the present invention is non-replicative since it lacks all or part of a viral genome, typically and preferably lacking all or part of the replicative and infectious components of a viral genome. The term “non-replicative” as used herein refers to being incapable of replicating the genome comprised or not in the VLP.

[0108] As used herein, the term “combine” (and grammatical variants such as “combined” or “combining”) refers to the process of admixing two or more components (e.g., a VSP carrier and a therapeutic agent) such that contact between the components occur and such contact allows the binding of the two or more components.

[0109] In some specific embodiments, a therapeutic agent (e.g., a bioactive peptide such as IL-2) can be genetically fused to a VSP protein (see, e.g., preliminary experiments disclosed in the first paragraph of Example 9). In specific embodiments, the therapeutic agent is a bioactive peptide (e.g., insulin, glucagon, growth hormone) in a nanoparticle form which is chemically conjugated to a VSP. In some embodiments, a therapeutic agent (e.g., a bioactive peptide) is chemically conjugated to a VSP without any linker interposed between the therapeutic agent and the linker. In some embodiments, a therapeutic agent (e.g., a bioactive peptide) is chemically conjugated to a VSP with at least one linker interposed between the therapeutic agent and the VSP.

[0110] In some embodiments, a VSP carrier can be chemically conjugated with more than one therapeutic agent (e.g., more than one bioactive peptide). In some embodiments, two or more VSP carriers can be chemically conjugated with one therapeutic agent (e.g., a bioactive peptide). In other embodiments, two or more than two VSP carriers can be chemically conjugated with more than one therapeutic agent (e.g., more than one bioactive peptide). In some embodiments, a therapeutic agent is biologically active while genetically fused or chemically conjugated to a VSP carrier. In other embodiments, the therapeutic agent (e.g., a bioactive peptide) is inactive or only partially active while genetically fused or chemically conjugated to a VSP carrier, in which case, chemical and/or enzymatic cleavage can be required to release the active (or a more active) form of the therapeutic agent. Conversely, in some embodiments, the therapeutic agent (e.g., a bioactive peptide) is active while genetically fused or chemically conjugated to a VSP carrier, and chemical and/or enzymatic cleavage can be used to release the active form of the therapeutic agent from the VSP carrier in order to inactivate the therapeutic agent. Thus, a therapeutic agent (e.g., a bioactive peptide) could be protected by the VSP carrier while in a part of the GIT (e.g., the stomach), and degraded or inactivated after passage to a different part of the GIT by the different conditions prevalent in that portion of the GIT (e.g., different pH or specific enzymes).

[0111] In some embodiments, a therapeutic agent (e.g., a bioactive peptide) and a VSP carrier can be genetically fused or chemically conjugated by a peptide linker or other type of linker that can be cleaved (e.g., chemically or by a protease) such as the active form of the therapeutic peptide is released from the VSP carrier. In some embodiments, a therapeutic agent (e.g., a bioactive peptide) and a VSP carrier can be genetically fused or chemically conjugated by a peptide linker or other type of linker that can be cleaved (e.g., chemically or by a protease) such as the inactive form of the therapeutic agent is released from the VSP carrier.

[0112] In some embodiments, a therapeutic agent (e.g., a bioactive peptide) and a VSP carrier (bound, genetically fused, or chemically conjugated) can be bound, genetically fused, or chemically conjugated with another molecule to form a bivalent molecule (for example, both the VSP carrier and the therapeutic agent being genetically fused to the carboxy terminus of the beta chain of C4b-binding protein (C4PB)).

VSP Carriers from Giardia VSPs

[0113] In some embodiments, the VSP carrier comprises a VSP sequence chosen among the complete repertoire of VSPs which are encoded at the DNA level in the genome of the Giardia parasite. This repertoire is composed of about 200 homologous VSP-encoding genes (vsps), which varies in different Giardia isolates (see, Adam et al., BMC Genomics 11:424 (2010)). It should be further noted that variants of the Giardia VSPs, fragments, and derivatives can also be used as VSP carriers according to the invention. A representative, non-limiting list of proteins that can be used as VSP carriers is presented in TABLE 1.

TABLE 1
Exemplary list of VSP and VSP-like proteins that
can be used as VSP carriers.

| SEQ | UNIPROT | |
|---|---|---|
| ID NO | IDENTIFIER | SPECIES |
| 7 | A0BQN4_PARTE | Paramecium tetraurelia |
| 8 | A0BR77_PARTE | Paramecium tetraurelia |
| 9 | A0D0W7_PARTE | Paramecium tetraurelia |
| 10 | A2E569_TRIVA | Trichomonas vaginalis |
| 11 | A2EKF7_TRIVA | Trichomonas vaginalis |
| 12 | A6YSN6_GIAIN | Giardia intestinalis |
| 13 | A7SVH3_NEMVE | Nematostella vectensis |
| 14 | A8B1N7_GIAIC | Giardia intestinalis |
| 15 | A8B1Y1_GIAIC | Giardia intestinalis |
| 16 | A8B2D7_GIAIC | Giardia intestinalis |
| 17 | A8B2E6_GIAIC | Giardia intestinalis |
| 18 | A8B2P0_GIAIC | Giardia intestinalis |
| 19 | A8B2X6_GIAIC | Giardia intestinalis |
| 20 | A8B2Y3_GIAIC | Giardia intestinalis |
| 21 | A8B3P1_GIAIC | Giardia intestinalis |
| 22 | A8B3R3_GIAIC | Giardia intestinalis |
| 23 | A8B3V9_GIAIC | Giardia intestinalis |
| 24 | A8B497_GIAIC | Giardia intestinalis |
| 25 | A8B4C6_GIAIC | Giardia intestinalis |
| 26 | A8B4J7_GIAIC | Giardia intestinalis |
| 27 | A8B4K3_GIAIC | Giardia intestinalis |
| 28 | A8B4K7_GIAIC | Giardia intestinalis |
| 29 | A8B4P3_GIAIC | Giardia intestinalis |
| 30 | A8B4S6_GIAIC | Giardia intestinalis |
| 31 | A8B4Y0_GIAIC | Giardia intestinalis |
| 32 | A8B4Y3_GIAIC | Giardia intestinalis |
| 33 | A8B582_GIAIC | Giardia intestinalis |
| 34 | A8B5B4_GIAIC | Giardia intestinalis |
| 35 | A8B5M7_GIAIC | Giardia intestinalis |
| 36 | A8B5M8_GIAIC | Giardia intestinalis |
| 37 | A8B5P6_GIAIC | Giardia intestinalis |
| 38 | A8B5Q2_GIAIC | Giardia intestinalis |
| 39 | A8B5U7_GIAIC | Giardia intestinalis |
| 40 | A8B5U8_GIAIC | Giardia intestinalis |
| 41 | A8B6C8_GIAIC | Giardia intestinalis |
| 42 | A8B6F0_GIAIC | Giardia intestinalis |
| 43 | A8B6G2_GIAIC | Giardia intestinalis |
| 44 | A8B6J1_GIAIC | Giardia intestinalis |
| 45 | A8B6V3_GIAIC | Giardia intestinalis |
| 46 | A8B728_GIAIC | Giardia intestinalis |
| 47 | A8B7F5_GIAIC | Giardia intestinalis |
| 48 | A8B7F8_GIAIC | Giardia intestinalis |
| 49 | A8B7K8_GIAIC | Giardia intestinalis |
| 50 | A8B7T7_GIAIC | Giardia intestinalis |
| 51 | A8B838_GIAIC | Giardia intestinalis |
| 52 | A8B8E0_GIAIC | Giardia intestinalis |
| 53 | A8B8R6_GIAIC | Giardia intestinalis |
| 54 | A8B8Y3_GIAIC | Giardia intestinalis |
| 55 | A8B9G0_GIAIC | Giardia intestinalis |
| 56 | A8B9Q8_GIAIC | Giardia intestinalis |
| 57 | A8B9R0_GIAIC | Giardia intestinalis |
| 58 | A8BA10_GIAIC | Giardia intestinalis |
| 59 | A8BA87_GIAIC | Giardia intestinalis |
| 60 | A8BAG1_GIAIC | Giardia intestinalis |
| 61 | A8BAG4_GIAIC | Giardia intestinalis |
| 62 | A8BAI1_GIAIC | Giardia intestinalis |
| 63 | A8BAX4_GIAIC | Giardia intestinalis |
| 64 | A8BB06_GIAIC | Giardia intestinalis |
| 65 | A8BB29_GIAIC | Giardia intestinalis |
| 66 | A8BB81_GIAIC | Giardia intestinalis |
| 67 | A8BBE8_GIAIC | Giardia intestinalis |
| 68 | A8BBH5_GIAIC | Giardia intestinalis |
| 69 | A8BBP7_GIAIC | Giardia intestinalis |
| 70 | A8BBQ0_GIAIC | Giardia intestinalis |
| 71 | A8BBQ1_GIAIC | Giardia intestinalis |
| 72 | A8BBR6_GIAIC | Giardia intestinalis |
| 73 | A8BBX7_GIAIC | Giardia intestinalis |
| 74 | A8BC24_GIAIC | Giardia intestinalis |
| 75 | A8BC41_GIAIC | Giardia intestinalis |
| 76 | A8BCN1_GIAIC | Giardia intestinalis |
| 77 | A8BCU7_GIAIC | Giardia intestinalis |
| 78 | A8BCV1_GIAIC | Giardia intestinalis |
| 79 | A8BCV5_GIAIC | Giardia intestinalis |
| 80 | A8BCV8_GIAIC | Giardia intestinalis |
| 81 | A8BCW0_GIAIC | Giardia intestinalis |
| 82 | A8BCW5_GIAIC | Giardia intestinalis |
| 83 | A8BD73_GIAIC | Giardia intestinalis |
| 84 | A8BD76_GIAIC | Giardia intestinalis |
| 85 | A8BDC4_GIAIC | Giardia intestinalis |
| 86 | A8BDH4_GIAIC | Giardia intestinalis |
| 87 | A8BDM0_GIAIC | Giardia intestinalis |
| 88 | A8BDP5_GIAIC | Giardia intestinalis |
| 89 | A8BEA2_GIAIC | Giardia intestinalis |
| 90 | A8BEA7_GIAIC | Giardia intestinalis |
| 91 | A8BEJ8_GIAIC | Giardia intestinalis |
| 92 | A8BEQ4_GIAIC | Giardia intestinalis |
| 93 | A8BET9_GIAIC | Giardia intestinalis |
| 94 | A8BEU2_GIAIC | Giardia intestinalis |
| 95 | A8BEV3_GIAIC | Giardia intestinalis |
| 96 | A8BFA0_GIAIC | Giardia intestinalis |
| 97 | A8BFC1_GIAIC | Giardia intestinalis |
| 98 | A8BFJ7_GIAIC | Giardia intestinalis |
| 99 | A8BFK4_GIAIC | Giardia intestinalis |
| 100 | A8BFY9_GIAIC | Giardia intestinalis |
| 101 | A8BFZ3_GIAIC | Giardia intestinalis |
| 102 | A8BG61_GIAIC | Giardia intestinalis |
| 103 | A8BGA3_GIAIC | Giardia intestinalis |
| 104 | A8BH77_GIAIC | Giardia intestinalis |
| 105 | A8BH92_GIAIC | Giardia intestinalis |
| 106 | A8BHI3_GIAIC | Giardia intestinalis |
| 107 | A8BHL4_GIAIC | Giardia intestinalis |
| 108 | A8BHY9_GIAIC | Giardia intestinalis |
| 109 | A8BJ28_GIAIC | Giardia intestinalis |
| 110 | A8BJM0_GIAIC | Giardia intestinalis |
| 111 | A8BJT8_GIAIC | Giardia intestinalis |
| 112 | A8BJU0_GIAIC | Giardia intestinalis |
| 113 | A8BJU2_GIAIC | Giardia intestinalis |
| 114 | A8BK37_GIAIC | Giardia intestinalis |
| 115 | A8BK84_GIAIC | Giardia intestinalis |
| 116 | A8BLI8_GIAIC | Giardia intestinalis |
| 117 | A8BLR0_GIAIC | Giardia intestinalis |
| 118 | A8BLZ5_GIAIC | Giardia intestinalis |
| 119 | A8BM49_GIAIC | Giardia intestinalis |
| 120 | A8BM52_GIAIC | Giardia intestinalis |
| 121 | A8BM73_GIAIC | Giardia intestinalis |
| 122 | A8BME9_GIAIC | Giardia intestinalis |
| 123 | A8BMY2_GIAIC | Giardia intestinalis |
| 124 | A8BN71_GIAIC | Giardia intestinalis |
| 125 | A8BNR0_GIAIC | Giardia intestinalis |
| 126 | A8BNR1_GIAIC | Giardia intestinalis |
| 127 | A8BNR4_GIAIC | Giardia intestinalis |
| 128 | A8BNZ3_GIAIC | Giardia intestinalis |
| 129 | A8BNZ4_GIAIC | Giardia intestinalis |
| 130 | A8BP21_GIAIC | Giardia intestinalis |
| 131 | A8BPL3_GIAIC | Giardia intestinalis |
| 132 | A8BPN5_GIAIC | Giardia intestinalis |
| 133 | A8BPN6_GIAIC | Giardia intestinalis |
| 134 | A8BPP1_GIAIC | Giardia intestinalis |
| 135 | A8BPP4_GIAIC | Giardia intestinalis |
| 136 | A8BPP7_GIAIC | Giardia intestinalis |
| 137 | A8BQ05_GIAIC | Giardia intestinalis |
| 138 | A8BQ57_GIAIC | Giardia intestinalis |
| 139 | A8BQ73_GIAIC | Giardia intestinalis |
| 140 | A8BQD0_GIAIC | Giardia intestinalis |
| 141 | A8BQD1_GIAIC | Giardia intestinalis |
| 142 | A8BQM2_GIAIC | Giardia intestinalis |
| 143 | A8BQM3_GIAIC | Giardia intestinalis |
| 144 | A8BQN8_GIAIC | Giardia intestinalis |
| 145 | A8BQX2_GIAIC | Giardia intestinalis |
| 146 | A8BQX8_GIAIC | Giardia intestinalis |
| 147 | A8BRF5_GIAIC | Giardia intestinalis |
| 148 | A8BRK4_GIAIC | Giardia intestinalis |
| 149 | A8BRR2_GIAIC | Giardia intestinalis |
| 150 | A8BRR9_GIAIC | Giardia intestinalis |
| 151 | A8BRS4_GIAIC | Giardia intestinalis |
| 152 | A8BRY1_GIAIC | Giardia intestinalis |
| 153 | A8BS16_GIAIC | Giardia intestinalis |
| 154 | A8BS49_GIAIC | Giardia intestinalis |
| 155 | A8BS56_GIAIC | Giardia intestinalis |
| 156 | A8BSC1_GIAIC | Giardia intestinalis |
| 157 | A8BSY8_GIAIC | Giardia intestinalis |
| 158 | A8BT57_GIAIC | Giardia intestinalis |
| 159 | A8BTL5_GIAIC | Giardia intestinalis |
| 160 | A8BTQ7_GIAIC | Giardia intestinalis |
| 161 | A8BTR0_GIAIC | Giardia intestinalis |
| 162 | A8BTS2_GIAIC | Giardia intestinalis |
| 163 | A8BTV4_GIAIC | Giardia intestinalis |
| 164 | A8BTV5_GIAIC | Giardia intestinalis |
| 165 | A8BTZ8_GIAIC | Giardia intestinalis |
| 166 | A8BUT4_GIAIC | Giardia intestinalis |
| 167 | A8BUU6_GIAIC | Giardia intestinalis |
| 168 | A8BV34_GIAIC | Giardia intestinalis |
| 169 | A8BV90_GIAIC | Giardia intestinalis |
| 170 | A8BVA8_GIAIC | Giardia intestinalis |
| 171 | A8BVH9_GIAIC | Giardia intestinalis |
| 172 | A8BVM8_GIAIC | Giardia intestinalis |
| 173 | A8BVQ2_GIAIC | Giardia intestinalis |
| 174 | A8BVU8_GIAIC | Giardia intestinalis |
| 175 | A8BVV3_GIAIC | Giardia intestinalis |
| 176 | A8BVX4_GIAIC | Giardia intestinalis |
| 177 | A8BVZ5_GIAIC | Giardia intestinalis |
| 178 | A8BWB7_GIAIC | Giardia intestinalis |
| 179 | A8BWQ1_GIAIC | Giardia intestinalis |
| 180 | A8BXF2_GIAIC | Giardia intestinalis |
| 181 | A8BXV1_GIAIC | Giardia intestinalis |
| 182 | A8BY81_GIAIC | Giardia intestinalis |
| 183 | A8BY91_GIAIC | Giardia intestinalis |
| 184 | A8BYJ1_GIAIC | Giardia intestinalis |
| 185 | A8BYM1_GIAIC | Giardia intestinalis |
| 186 | A8BZ11_GIAIC | Giardia intestinalis |
| 187 | A8BZ19_GIAIC | Giardia intestinalis |
| 188 | A8BZM3_GIAIC | Giardia intestinalis |
| 189 | A8C008_GIAIC | Giardia intestinalis |
| 190 | A8C017_GIAIC | Giardia intestinalis |
| 191 | A8C020_GIAIC | Giardia intestinalis |
| 192 | A8C025_GIAIC | Giardia intestinalis |
| 193 | A8C028_GIAIC | Giardia intestinalis |
| 194 | A8C039_GIAIC | Giardia intestinalis |
| 195 | A8C046_GIAIC | Giardia intestinalis |
| 196 | A8C048_GIAIC | Giardia intestinalis |
| 197 | A8C081_GIAIC | Giardia intestinalis |
| 198 | A8C085_GIAIC | Giardia intestinalis |
| 199 | A8C088_GIAIC | Giardia intestinalis |
| 200 | A8C091_GIAIC | Giardia intestinalis |
| 201 | A8C094_GIAIC | Giardia intestinalis |
| 202 | A8C0A1_GIAIC | Giardia intestinalis |
| 203 | A8C0A4_GIAIC | Giardia intestinalis |
| 204 | A8C0A9_GIAIC | Giardia intestinalis |
| 205 | A8C0B7_GIAIC | Giardia intestinalis |
| 206 | A8C0C3_GIAIC | Giardia intestinalis |
| 207 | A8C0D1_GIAIC | Giardia intestinalis |
| 208 | A8C0E0_GIAIC | Giardia intestinalis |
| 209 | A8C0F1_GIAIC | Giardia intestinalis |
| 210 | A8C0F4_GIAIC | Giardia intestinalis |
| 211 | A8C0G2_GIAIC | Giardia intestinalis |
| 212 | A8C0H0_GIAIC | Giardia intestinalis |
| 213 | A8C0I3_GIAIC | Giardia intestinalis |
| 214 | A8C0J1_GIAIC | Giardia intestinalis |
| 215 | A8C0L4_GIAIC | Giardia intestinalis |
| 216 | A8C0N5_GIAIC | Giardia intestinalis |
| 217 | A8C0N9_GIAIC | Giardia intestinalis |
| 218 | A8C0R2_GIAIC | Giardia intestinalis |
| 219 | A8C0U5_GIAIC | Giardia intestinalis |
| 220 | A8C0V5_GIAIC | Giardia intestinalis |
| 221 | A8C0W0_GIAIC | Giardia intestinalis |
| 222 | A8C109_GIAIC | Giardia intestinalis |
| 223 | B0EAK2_ENTDS | Entamoeba dispar |
| 224 | B0EU80_ENTDS | Entamoeba dispar |
| 225 | B1N5Q9_ENTHI | Entamoeba histolytica |
| 226 | C4M6P7_ENTHI | Entamoeba histolytica |
| 227 | C4MAB2_ENTHI | Entamoeba histolytica |
| 228 | C6LMQ7_GIAIB | Giardia intestinalis |
| 229 | C6LMR0_GIAIB | Giardia intestinalis |
| 230 | C6LMY7_GIAIB | Giardia intestinalis |
| 231 | C6LN95_GIAIB | Giardia intestinalis |
| 232 | C6LND2_GIAIB | Giardia intestinalis |
| 233 | C6LNK7_GIAIB | Giardia intestinalis |
| 234 | C6LNL8_GIAIB | Giardia intestinalis |
| 235 | C6LNP8_GIAIB | Giardia intestinalis |
| 236 | C6LNT8_GIAIB | Giardia intestinalis |
| 237 | C6LPA7_GIAIB | Giardia intestinalis |
| 238 | C6LPF5_GIAIB | Giardia intestinalis |
| 239 | C6LPK7_GIAIB | Giardia intestinalis |
| 240 | C6LPM5_GIAIB | Giardia intestinalis |
| 241 | C6LQL2_GIAIB | Giardia intestinalis |
| 242 | C6LR62_GIAIB | Giardia intestinalis |
| 243 | C6LR84_GIAIB | Giardia intestinalis |
| 244 | C6LRD7_GIAIB | Giardia intestinalis |
| 245 | C6LSQ1_GIAIB | Giardia intestinalis |
| 246 | C6LT09_GIAIB | Giardia intestinalis |
| 247 | C6LT91_GIAIB | Giardia intestinalis |
| 248 | C6LTI3_GIAIB | Giardia intestinalis |
| 249 | C6LTI4_GIAIB | Giardia intestinalis |
| 250 | C6LUA9_GIAIB | Giardia intestinalis |
| 251 | C6LUN4_GIAIB | Giardia intestinalis |
| 252 | C6LV02_GIAIB | Giardia intestinalis |
| 253 | C6LV68_GIAIB | Giardia intestinalis |
| 254 | C6LVB6_GIAIB | Giardia intestinalis |
| 255 | C6LVG2_GIAIB | Giardia intestinalis |
| 256 | C6LVI0_GIAIB | Giardia intestinalis |
| 257 | C6LVL2_GIAIB | Giardia intestinalis |
| 258 | C6LVZ6_GIAIB | Giardia intestinalis |
| 259 | C6LW79_GIAIB | Giardia intestinalis |
| 260 | C6LW95_GIAIB | Giardia intestinalis |
| 261 | C6LW96_GIAIB | Giardia intestinalis |
| 262 | C6LWD6_GIAIB | Giardia intestinalis |
| 263 | C6LWL1_GIAIB | Giardia intestinalis |
| 264 | C6LWM7_GIAIB | Giardia intestinalis |
| 265 | C6LWN2_GIAIB | Giardia intestinalis |
| 266 | C6LWN3_GIAIB | Giardia intestinalis |
| 267 | C6LWN4_GIAIB | Giardia intestinalis |
| 268 | C6LWQ8_GIAIB | Giardia intestinalis |
| 269 | C6LX19_GIAIB | Giardia intestinalis |
| 270 | C6LX20_GIAIB | Giardia intestinalis |
| 271 | C6LXE3_GIAIB | Giardia intestinalis |
| 272 | C6LXG6_GIAIB | Giardia intestinalis |
| 273 | C6LXK0_GIAIB | Giardia intestinalis |
| 274 | C6LYE5_GIAIB | Giardia intestinalis |
| 275 | C6M071_GIAIB | Giardia intestinalis |
| 276 | C6M0C1_GIAIB | Giardia intestinalis |
| 277 | D3KID0_GIAIC | Giardia intestinalis |
| 278 | D3KID3_GIAIC | Giardia intestinalis |
| 279 | E1EVI9_GIAIA | Giardia intestinalis |
| 280 | E1EVN5_GIAIA | Giardia intestinalis |
| 281 | E1EVS1_GIAIA | Giardia intestinalis |
| 282 | E1EVS6_GIAIA | Giardia intestinalis |
| 283 | E1EVZ6_GIAIA | Giardia intestinalis |
| 284 | E1EW20_GIAIA | Giardia intestinalis |
| 285 | E1EW38_GIAIA | Giardia intestinalis |
| 286 | E1EW69_GIAIA | Giardia intestinalis |
| 287 | E1EWA1_GIAIA | Giardia intestinalis |
| 288 | E1EWG3_GIAIA | Giardia intestinalis |
| 289 | E1EWG5_GIAIA | Giardia intestinalis |
| 290 | E1EWJ7_GIAIA | Giardia intestinalis |
| 291 | E1EWL5_GIAIA | Giardia intestinalis |
| 292 | E1EWV5_GIAIA | Giardia intestinalis |
| 293 | E1EX39_GIAIA | Giardia intestinalis |
| 294 | E1EX68_GIAIA | Giardia intestinalis |
| 295 | E1EX83_GIAIA | Giardia intestinalis |
| 296 | E1EX85_GIAIA | Giardia intestinalis |
| 297 | E1EX98_GIAIA | Giardia intestinalis |
| 298 | E1EXE5_GIAIA | Giardia intestinalis |
| 299 | E1EXF3_GIAIA | Giardia intestinalis |
| 300 | E1EXH8_GIAIA | Giardia intestinalis |
| 301 | E1EXH9_GIAIA | Giardia intestinalis |
| 302 | E1EXL8_GIAIA | Giardia intestinalis |
| 303 | E1EXQ8_GIAIA | Giardia intestinalis |
| 304 | E1EXV3_GIAIA | Giardia intestinalis |
| 305 | E1EXV4_GIAIA | Giardia intestinalis |
| 306 | E1EXY2_GIAIA | Giardia intestinalis |
| 307 | E1EYP5_GIAIA | Giardia intestinalis |
| 308 | E1EYT9_GIAIA | Giardia intestinalis |
| 309 | E1EYU0_GIAIA | Giardia intestinalis |
| 310 | E1EZ23_GIAIA | Giardia intestinalis |
| 311 | E1EZ44_GIAIA | Giardia intestinalis |
| 312 | E1EZ63_GIAIA | Giardia intestinalis |
| 313 | E1EZD7_GIAIA | Giardia intestinalis |
| 314 | E1EZF7_GIAIA | Giardia intestinalis |
| 315 | E1EZI4_GIAIA | Giardia intestinalis |
| 316 | E1EZI5_GIAIA | Giardia intestinalis |
| 317 | E1EZR7_GIAIA | Giardia intestinalis |
| 318 | E1EZR8_GIAIA | Giardia intestinalis |
| 319 | E1EZZ8_GIAIA | Giardia intestinalis |
| 320 | E1F044_GIAIA | Giardia intestinalis |
| 321 | E1F046_GIAIA | Giardia intestinalis |
| 322 | E1F0C0_GIAIA | Giardia intestinalis |
| 323 | E1F0K6_GIAIA | Giardia intestinalis |
| 324 | E1F0M1_GIAIA | Giardia intestinalis |
| 325 | E1F0M8_GIAIA | Giardia intestinalis |
| 326 | E1F0M9_GIAIA | Giardia intestinalis |
| 327 | E1F0N0_GIAIA | Giardia intestinalis |
| 328 | E1F0N3_GIAIA | Giardia intestinalis |
| 329 | E1F0P7_GIAIA | Giardia intestinalis |
| 330 | E1F0T4_GIAIA | Giardia intestinalis |
| 331 | E1F129_GIAIA | Giardia intestinalis |
| 332 | E1F130_GIAIA | Giardia intestinalis |
| 333 | E1F1D1_GIAIA | Giardia intestinalis |
| 334 | E1F1F5_GIAIA | Giardia intestinalis |
| 335 | E1F1J9_GIAIA | Giardia intestinalis |
| 336 | E1F1K4_GIAIA | Giardia intestinalis |
| 337 | E1F1S0_GIAIA | Giardia intestinalis |
| 338 | E1F1U0_GIAIA | Giardia intestinalis |
| 339 | E1F1Y3_GIAIA | Giardia intestinalis |
| 340 | E1F1Y4_GIAIA | Giardia intestinalis |
| 341 | E1F1Z6_GIAIA | Giardia intestinalis |
| 342 | E1F213_GIAIA | Giardia intestinalis |
| 343 | E1F225_GIAIA | Giardia intestinalis |
| 344 | E1F249_GIAIA | Giardia intestinalis |
| 345 | E1F2E8_GIAIA | Giardia intestinalis |
| 346 | E1F2L4_GIAIA | Giardia intestinalis |
| 347 | E1F2Q5_GIAIA | Giardia intestinalis |
| 348 | E1F2S0_GIAIA | Giardia intestinalis |
| 349 | E1F2V4_GIAIA | Giardia intestinalis |
| 350 | E1F2Z8_GIAIA | Giardia intestinalis |
| 351 | E1F326_GIAIA | Giardia intestinalis |
| 352 | E1F373_GIAIA | Giardia intestinalis |
| 353 | E1F3A2_GIAIA | Giardia intestinalis |
| 354 | E1F3D7_GIAIA | Giardia intestinalis |
| 355 | E1F3H3_GIAIA | Giardia intestinalis |
| 356 | E1F3M4_GIAIA | Giardia intestinalis |
| 357 | E1F3S1_GIAIA | Giardia intestinalis |
| 358 | E1F3U6_GIAIA | Giardia intestinalis |
| 359 | E1F3X6_GIAIA | Giardia intestinalis |
| 360 | E1F3X7_GIAIA | Giardia intestinalis |
| 361 | E1F428_GIAIA | Giardia intestinalis |
| 362 | E1F447_GIAIA | Giardia intestinalis |
| 363 | E1F459_GIAIA | Giardia intestinalis |
| 364 | E1F477_GIAIA | Giardia intestinalis |
| 365 | E1F478_GIAIA | Giardia intestinalis |
| 366 | E1F4C2_GIAIA | Giardia intestinalis |
| 367 | E1F4C3_GIAIA | Giardia intestinalis |
| 368 | E1F4G3_GIAIA | Giardia intestinalis |
| 369 | E1F4G6_GIAIA | Giardia intestinalis |
| 370 | E1F4L3_GIAIA | Giardia intestinalis |
| 371 | E1F4L5_GIAIA | Giardia intestinalis |
| 372 | E1F4N7_GIAIA | Giardia intestinalis |
| 373 | E1F4N8_GIAIA | Giardia intestinalis |
| 374 | E1F4N9_GIAIA | Giardia intestinalis |
| 375 | E1F4X0_GIAIA | Giardia intestinalis |
| 376 | E1F562_GIAIA | Giardia intestinalis |
| 377 | E1F591_GIAIA | Giardia intestinalis |
| 378 | E1F598_GIAIA | Giardia intestinalis |
| 379 | E1F5C1_GIAIA | Giardia intestinalis |
| 380 | E1F5E4_GIAIA | Giardia intestinalis |
| 381 | E1F5I0_GIAIA | Giardia intestinalis |
| 382 | E1F5N4_GIAIA | Giardia intestinalis |
| 383 | E1F5N5_GIAIA | Giardia intestinalis |
| 384 | E1F5Q7_GIAIA | Giardia intestinalis |
| 385 | E1F5Q8_GIAIA | Giardia intestinalis |
| 386 | E1F5R1_GIAIA | Giardia intestinalis |
| 387 | E1F5S2_GIAIA | Giardia intestinalis |
| 388 | E1F5W0_GIAIA | Giardia intestinalis |
| 389 | E1F5W1_GIAIA | Giardia intestinalis |
| 390 | E1F5X3_GIAIA | Giardia intestinalis |
| 391 | E1F5Y9_GIAIA | Giardia intestinalis |
| 392 | E1F5Z9_GIAIA | Giardia intestinalis |
| 393 | E1F623_GIAIA | Giardia intestinalis |
| 394 | E1F663_GIAIA | Giardia intestinalis |
| 395 | E1F667_GIAIA | Giardia intestinalis |
| 396 | E1F670_GIAIA | Giardia intestinalis |
| 397 | E1F685_GIAIA | Giardia intestinalis |
| 398 | E1F6C5_GIAIA | Giardia intestinalis |
| 399 | E1F6G2_GIAIA | Giardia intestinalis |
| 400 | E1F6H9_GIAIA | Giardia intestinalis |
| 401 | E1F6I0_GIAIA | Giardia intestinalis |
| 402 | E1F6L8_GIAIA | Giardia intestinalis |
| 403 | E1F6M3_GIAIA | Giardia intestinalis |
| 404 | E1F6Q9_GIAIA | Giardia intestinalis |
| 405 | E1F6T5_GIAIA | Giardia intestinalis |
| 406 | E1F6V8_GIAIA | Giardia intestinalis |
| 407 | E1F727_GIAIA | Giardia intestinalis |
| 408 | E1F734_GIAIA | Giardia intestinalis |
| 409 | E1F771_GIAIA | Giardia intestinalis |
| 410 | E1F772_GIAIA | Giardia intestinalis |
| 411 | E1F797_GIAIA | Giardia intestinalis |
| 412 | E1F7B5_GIAIA | Giardia intestinalis |
| 413 | E1F7B6_GIAIA | Giardia intestinalis |
| 414 | E1F7D7_GIAIA | Giardia intestinalis |
| 415 | E1F7F9_GIAIA | Giardia intestinalis |
| 416 | E1F7P6_GIAIA | Giardia intestinalis |
| 417 | E1F7U6_GIAIA | Giardia intestinalis |
| 418 | E1F7W8_GIAIA | Giardia intestinalis |
| 419 | E1F7X0_GIAIA | Giardia intestinalis |
| 420 | E1F7X8_GIAIA | Giardia intestinalis |
| 421 | E1F7Z9_GIAIA | Giardia intestinalis |
| 422 | E1F856_GIAIA | Giardia intestinalis |
| 423 | E1F891_GIAIA | Giardia intestinalis |
| 424 | E1F8E1_GIAIA | Giardia intestinalis |
| 425 | E1F8F3_GIAIA | Giardia intestinalis |
| 426 | E1F8K1_GIAIA | Giardia intestinalis |
| 427 | E1F8M3_GIAIA | Giardia intestinalis |
| 428 | E1F8N7_GIAIA | Giardia intestinalis |
| 429 | E1F8N8_GIAIA | Giardia intestinalis |
| 430 | E1F8P0_GIAIA | Giardia intestinalis |
| 431 | E1F8P4_GIAIA | Giardia intestinalis |
| 432 | E1F8Q3_GIAIA | Giardia intestinalis |
| 433 | E1F8Q5_GIAIA | Giardia intestinalis |
| 434 | E1F8Q9_GIAIA | Giardia intestinalis |
| 435 | E1F8S0_GIAIA | Giardia intestinalis |
| 436 | E1F8S1_GIAIA | Giardia intestinalis |
| 437 | E1F8U6_GIAIA | Giardia intestinalis |
| 438 | E1F8U7_GIAIA | Giardia intestinalis |
| 439 | E1F8V9_GIAIA | Giardia intestinalis |
| 440 | E1F8W0_GIAIA | Giardia intestinalis |
| 441 | E1F8W3_GIAIA | Giardia intestinalis |
| 442 | E1F8Y1_GIAIA | Giardia intestinalis |
| 443 | E1F8Z1_GIAIA | Giardia intestinalis |
| 444 | E1F917_GIAIA | Giardia intestinalis |
| 445 | E1F930_GIAIA | Giardia intestinalis |
| 446 | E1F954_GIAIA | Giardia intestinalis |
| 447 | E1F987_GIAIA | Giardia intestinalis |
| 448 | E1F9D3_GIAIA | Giardia intestinalis |
| 449 | E1F9D5_GIAIA | Giardia intestinalis |
| 450 | E1F9E4_GIAIA | Giardia intestinalis |
| 451 | E1F9F7_GIAIA | Giardia intestinalis |
| 452 | E1F9H3_GIAIA | Giardia intestinalis |
| 453 | E1F9I2_GIAIA | Giardia intestinalis |
| 454 | E1F9I5_GIAIA | Giardia intestinalis |
| 455 | E1F9J0_GIAIA | Giardia intestinalis |
| 456 | E1F9J2_GIAIA | Giardia intestinalis |
| 457 | E1F9L1_GIAIA | Giardia intestinalis |
| 458 | E1F9M5_GIAIA | Giardia intestinalis |
| 459 | E1F9M9_GIAIA | Giardia intestinalis |
| 460 | E1F9N1_GIAIA | Giardia intestinalis |
| 461 | E1F9N2_GIAIA | Giardia intestinalis |
| 462 | E1F9Q7_GIAIA | Giardia intestinalis |
| 463 | E1F9R4_GIAIA | Giardia intestinalis |
| 464 | E1F9R6_GIAIA | Giardia intestinalis |
| 465 | E1F9U1_GIAIA | Giardia intestinalis |
| 466 | E2RTM9_GIAIN | Giardia intestinalis |
| 467 | E2RTN8_GIAIC | Giardia intestinalis |
| 468 | E2RTU6_GIAIC | Giardia intestinalis |
| 469 | E2RTV3_GIAIC | Giardia intestinalis |
| 470 | E2RTX4_GIAIC | Giardia intestinalis |
| 471 | E2RU01_GIAIC | Giardia intestinalis |
| 472 | E2RU12_GIAIC | Giardia intestinalis |
| 473 | E2RU28_GIAIC | Giardia intestinalis |
| 474 | E2RU34_GIAIC | Giardia intestinalis |
| 475 | E2RU43_GIAIC | Giardia intestinalis |
| 476 | E2RU54_GIAIC | Giardia intestinalis |
| 477 | E5EZ44_GIAIN | Giardia intestinalis |
| 478 | E5EZ45_GIAIN | Giardia intestinalis |
| 479 | E5EZ46_GIAIN | Giardia intestinalis |
| 480 | E5EZ47_GIAIN | Giardia intestinalis |
| 481 | G0QQQ1_ICHMG | Ichthyophthirius multifiliis |
| 482 | G0QTU6_ICHMG | Ichthyophthirius multifiliis |
| 483 | O97443_GIAIN | Giardia intestinalis |
| 484 | O97444_GIAIN | Giardia intestinalis |
| 485 | O97448_GIAIN | Giardia intestinalis |
| 486 | O97450_GIAIN | Giardia intestinalis |
| 487 | TSA4_GIAIN | Giardia intestinalis |
| 488 | VS41_GIAIN | Giardia intestinalis |
| 489 | TS11_GIAIN | Giardia intestinalis |
| 490 | Q07317_GIAIN | Giardia intestinalis |
| 491 | Q0R0E0_GIAIN | Giardia intestinalis |
| 492 | Q22M55_TETTS | Tetrahymena thermophila |
| 493 | Q234X6_TETTS | Tetrahymena thermophila |
| 494 | Q24959_GIAIN | Giardia intestinalis |
| 495 | Q24960_GIAIN | Giardia intestinalis |
| 496 | Q24962_GIAIN | Giardia intestinalis |
| 497 | Q24970_GIAIN | Giardia intestinalis |
| 498 | Q24971_GIAIN | Giardia intestinalis |
| 499 | Q24977_GIAIN | Giardia intestinalis |
| 500 | Q24986_GIAIN | Giardia intestinalis |
| 501 | Q24987_GIAIN | Giardia intestinalis |
| 502 | Q24988_GIAIN | Giardia intestinalis |
| 503 | Q24990_GIAIN | Giardia intestinalis |
| 504 | Q24992_GIAIN | Giardia intestinalis |
| 505 | Q38QK0_GIAIN | Giardia intestinalis |
| 506 | Q49L26_GIAMU | Giardia muris |
| 507 | Q49L27_GIAMU | Giardia muris |
| 508 | Q49L28_GIAMU | Giardia muris |
| 509 | Q49L29_GIAMU | Giardia muris |
| 510 | Q49L30_GIAMU | Giardia muris |
| 511 | Q49L31_GIAMU | Giardia muris |
| 512 | Q4RPQ0_TETNG | Tetraodon nigroviridis |
| 513 | Q7JNB5_GIAIN | Giardia intestinalis |
| 514 | Q7M3R4_GIAIN | Giardia intestinalis |
| 515 | Q8I0M3_GIAIN | Giardia intestinalis |
| 516 | Q8I0P4_GIAIN | Giardia intestinalis |
| 517 | Q8I8V1_GIAIN | Giardia intestinalis |
| 518 | Q8I8V2_GIAIN | Giardia intestinalis |
| 519 | Q8I8V3_GIAIN | Giardia intestinalis |
| 520 | Q8I8V4_GIAIN | Giardia intestinalis |
| 521 | Q8I8V5_GIAIN | Giardia intestinalis |
| 522 | Q8I8V6_GIAIN | Giardia intestinalis |
| 523 | Q8I8V7_GIAIN | Giardia intestinalis |
| 524 | Q8I8V8_GIAIN | Giardia intestinalis |
| 525 | Q8I8V9_GIAIN | Giardia intestinalis |
| 526 | Q8I8W0_GIAIN | Giardia intestinalis |
| 527 | Q8I8W1_GIAIN | Giardia intestinalis |
| 528 | Q8I8W2_GIAIN | Giardia intestinalis |
| 529 | Q8I8W3_GIAIN | Giardia intestinalis |
| 530 | Q8I8W4_GIAIN | Giardia intestinalis |
| 531 | Q8I8W6_GIAIN | Giardia intestinalis |
| 532 | Q8MPM6_GIAIN | Giardia intestinalis |
| 533 | Q95PT9_GIAIN | Giardia intestinalis |
| 534 | Q95WU1_GIAIN | Giardia intestinalis |
| 535 | Q967R8_GIAIN | Giardia intestinalis |
| 536 | Q967R9_GIAIN | Giardia intestinalis |
| 537 | Q9BH65_GIAIN | Giardia intestinalis |
| 538 | Q9BIJ8_GIAIN | Giardia intestinalis |
| 539 | Q9BIJ9_GIAIN | Giardia intestinalis |
| 540 | Q9BIK0_GIAIN | Giardia intestinalis |
| 541 | Q9BIK1_GIAIN | Giardia intestinalis |
| 542 | Q9BIK2_GIAIN | Giardia intestinalis |
| 543 | Q9BIK3_GIAIN | Giardia intestinalis |
| 544 | Q9BIK4_GIAIN | Giardia intestinalis |
| 545 | Q9BIK5_GIAIN | Giardia intestinalis |
| 546 | Q9BIK6_GIAIN | Giardia intestinalis |
| 547 | Q9BIK7_GIAIN | Giardia intestinalis |
| 548 | Q9BIK8_GIAIN | Giardia intestinalis |
| 549 | Q9BIK9_GIAIN | Giardia intestinalis |
| 550 | Q9BIL0_GIAIN | Giardia intestinalis |
| 551 | Q9BIL1_GIAIN | Giardia intestinalis |
| 552 | Q9BIL2_GIAIN | Giardia intestinalis |
| 553 | Q9BIL3_GIAIN | Giardia intestinalis |
| 554 | Q9BIL4_GIAIN | Giardia intestinalis |
| 555 | Q9BIL5_GIAIN | Giardia intestinalis |
| 556 | Q9BIL6_GIAIN | Giardia intestinalis |
| 557 | Q9BIL7_GIAIN | Giardia intestinalis |
| 558 | Q9BIL8_GIAIN | Giardia intestinalis |
| 559 | Q9BIL9_GIAIN | Giardia intestinalis |
| 560 | Q9BIM0_GIAIN | Giardia intestinalis |
| 561 | Q9BIM1_GIAIN | Giardia intestinalis |
| 562 | Q9BIM2_GIAIN | Giardia intestinalis |
| 563 | Q9BIM3_GIAIN | Giardia intestinalis |
| 564 | Q9GQ40_GIAIN | Giardia intestinalis |
| 565 | Q9GQ41_GIAIN | Giardia intestinalis |
| 566 | Q9GQ42_GIAIN | Giardia intestinalis |
| 567 | Q9GQ43_GIAIN | Giardia intestinalis |
| 568 | Q9GQ44_GIAIN | Giardia intestinalis |
| 569 | Q9GQ45_GIAIN | Giardia intestinalis |
| 570 | Q9GQ46_GIAIN | Giardia intestinalis |
| 571 | Q9GQ47_GIAIN | Giardia intestinalis |
| 572 | Q9GS24_GIAIN | Giardia intestinalis |
| 573 | Q9GSP6_GIAIN | Giardia intestinalis |
| 574 | Q9NGL3_GIAIN | Giardia intestinalis |
| 575 | Q9NGZ3_GIAIN | Giardia intestinalis |
| 576 | Q9NGZ6_GIAIN | Giardia intestinalis |
| 577 | Q9NGZ7_GIAIN | Giardia intestinalis |
| 578 | Q9NH87_GIAIN | Giardia intestinalis |
| 579 | Q9U013_GIAIN | Giardia intestinalis |
| 580 | Q9U018_GIAIN | Giardia intestinalis |
| 581 | Q9U019_GIAIN | Giardia intestinalis |
| 582 | Q9U021_GIAIN | Giardia intestinalis |
| 583 | Q9U048_GIAIN | Giardia intestinalis |
| 584 | Q9U063_GIAIN | Giardia intestinalis |
| 585 | Q9U064_GIAIN | Giardia intestinalis |
| 586 | Q9XTJ7_GIAIN | Giardia intestinalis |
| 587 | Q9XTK3_GIAIN | Giardia intestinalis |
| 588 | Q9XY90_GIAIN | Giardia intestinalis |

[0114] TABLE 1 includes the sequences of 585 VSP and VSP-like proteins comprising Interpro Giardia variant-specific surface protein motif IPR005127 (sequence list published online at embl-ebi.org/interpro/IEntry?ac=IPR005127 and publicly available on Jun. 12, 2012). Other VSP and VSP-like proteins that can be used as VSP carriers according to the present disclosure are the 1,079 protein sequences comprising the Giardia variant-specific surface protein motif PF03302 available at Version 26.0 of the Pfam database (sequence list published online at pfam.sanger.ac.uk/family/PF03302 and publicly available on Jun. 12, 2012). The lists of protein sequences published in the above cited databases and publicly available on the above disclosed dates are herein incorporated by reference in their entireties.

[0115] As above-mentioned, the Giardia VSPs and more particularly the extracellular domain of the Giardia VSPs comprise multiple CXXC motifs, preferably multiple CXXC motifs separated by several amino acids, from 3 to 20 amino acids and more particularly from 5 to 8 amino acids (as observed by multiple sequence alignments). Thus, in some embodiments, the VSP carrier is a fragment, analog or derivative of a VSP or VSP-like protein from Giardia, wherein the VSP carrier comprises 2, 3, 4, 5, 6, 7, 8, 9, 10, 11, 12, 13, 14, 15, 16, 17, 18, 19, 20, 21, 22, 23, 24, 25, 26, 27, 28, 29, 30, 31, 32, 33, 34, 35, 36, 37, 38, 39 or 40 CXXC motifs. In some embodiments, the VSP carrier comprises at least about 40, at least about 50, at least about 60, at least about 70, at least 80, about 90 or at least about 100 CXXC motifs from a Giardia VSP.

[0116] In a particular embodiment, the Giardia parasite is Giardia lamblia. In one embodiment, the Giardia VSP can be without limitation VSP9B10 (Uniprot:Q9GS24), VSP1267 (Uniprot:Q07317), VSPA6 (Uniprot:Q24970), VSPS1 (Uniprot:Q8I0P4), VSPS2 (Uniprot:Q8I8W6), VSPS3 (Uniprot:Q8I0M3), VSPS4 (Uniprot: E2RTM9), VSPS5 (Uniprot:Q8I8W4), VSPS6 (Uniprot:Q8I8W3), VSPS7 (Uniprot:Q8I8W2), VSPS8 (Uniprot:E2RTU6), VSPAS1 (Uniprot:Q8I0M3), VSPAS2 (Uniprot:818W0), VSPAS3 (Uniprot:Q8I8V9), VSPAS4 (Uniprot:Q8I0P4), VSPAS5 (Uniprot:Q8I8V8), VSPAS6 (Uniprot:Q8I8V7), VSPAS7 (Uniprot:Q8I8V6), VSPAS8 (Uniprot:Q8I8V5), VSPAS9 (Uniprot:Q8I8V4), VSPAS10 (Uniprot:Q8I8V3), VSPAS11 (Uniprot:Q8I8V2), VSPAS12 (Uniprot:E2RU01) or VSPH7 (Uniprot: □24992) of Giardia lamblia, or fragments, variants, or derivatives thereof.

[0117] In one embodiment, a VSP carrier comprises the extracellular domain of a Giardia VSP, or a fragment, variant or derivative thereof (since said extracellular domain is the amino-terminal cysteine rich region comprising multiple CXXC motifs of the Giardia VSP protein).

[0118] The extracellular domain of a Giardia VSP is the domain resistant to the pH, temperature and proteolytic digestion. Accordingly, in another embodiment, the VSP carrier according to the invention comprises only the extracellular domain of a Giardia VSP, or a fragment, variant, or derivative thereof. In a particular embodiment, the VSP carrier comprises the extracellular sequence of VSP1267 (SEQ ID NO:2), comprising the N-terminal signal peptide. The transmembrane region and the cytoplasmic tail of a Giardia VSP are thus eliminated. It should be noted that the peptide signal can also be removed from the VSP extracellular domain.

[0119] A list of VSP and VSP-like proteins suitable to generate VSP carriers, including their sequences, Uniprot Accession Numbers, and Uniprot Entry Names is included at the end of this specification. The correspondence between Uniprot Accession Nos. and Entry Names and VSP protein number can be determined from the Uniprot entry at www.uniprot.org. E.g., Uniprot Accession No, Q07317 and its Entry Name Q07317_GIAIN would correspond to VSP1267.

[0120] The term “VSP1267 carrier” refers to a recombinantly produced fragment of the Giardia VSP protein VSP1267 without the transmembrane domain and cytosolic tail, but with the signal peptide intact and further comprising a C-terminal His6 tag (SEQ ID NO:1, shown in FIG. 5A). In some embodiments, a VSP carrier is a fragment, variant, or derivative of the extracellular domain of VSP1267 (protein sequence is SEQ ID NO:2; DNA coding sequence is SEQ ID NO: 4). In other embodiments, a VSP carrier is a fragment, variant, or VSP9B10 (protein sequence is SEQ ID NO:3; DNA coding sequence is SEQ ID NO: 5). See TABLE 2.

TABLE 2
Protein and DNA Sequences of exemplary VSP carriers.

| | |
|---|---|
| Variant-specific surface protein (VSP) 1267 | Giardia lamblia |
| (without transmembrane domain and cytosolic tail) | EMBL AAA29159.1 |

Protein Sequence (signal peptide is underlined) (SEQ ID NO: 2)
MLLIAFYLILSTFAVDCKNSGNSCEAGQCDTIGDTEICMQCNQGKVPINGICTAHSEEAVTNAGCKKNG
GTNIEESDKVCGQCGNGYFLHKGGCYKIGEAPGNLICADEASNEGARTAGVCGACKDGYYKNSDAVATA
DSCIACEDANCATCGGAGENKCTKCIDGYFVGATGNEGGCIKCDATTGPNSYKGVAGCAKCEKPKNAGP
AKCIECAADYLKTEADEQTSCVSEAVCREGKTHFPTTDSAGGNKKVCVSCGTTNNGGIENCGECTSKES
AARAGTEITCTKCSSNNLSPLGDACLTDCPAGTYAVSGDSGSVCKPCHNTCAGCQTDDRETSCTACSPG
YSLLYESEGATGRCVKECTGAFITNCADGQCTANVGGAKYCTQCKDGYAPIDGICTAVAAAGRDVSVCT
ATGGKCTACTGNYALLSGGCYNTQTLPGKSVCKAVANSNDGKCKTCANGQAPDPATNFCPLCDSTCAEC
STKNDADACTKCFPGYYKTGNKCIKCTESSENGKKIDGIPDCLSCEAPINTGPAICYVKTDGTSDDNSG
NGGDSTNKSGLST
DNA Sequence (sequence encoding the signal peptide is underlined)
(SEQ ID NO: 4)
ATGTTGTTGATAGCCTTCTATCTTATATTATCTACATTTGCAGTAGATTGCAAGAATAGTGGAAATAGT
TGTGAAGCTGGCCAATGTGATACGATTGGCGATACTGAAATCTGTATGCAATGTAATCAAGGGAAAGTA
CCCATCAATGGAATATGTACAGCCCATAGTGAAGAAGCAGTCACTAACGCTGGTTGTAAGAAGAACGGG
GGTACTAATATAGAAGAAAGTGATAAGGTATGTGGACAATGTGGAAATGGCTACTTCCTGCACAAAGGC
GGATGCTATAAGATAGGAGAGGCTCCTGGCAATCTCATCTGTGCGGATGAGGCGTCAAATCCTGGTGCA
CGTACTGCAGGGGTGTGTGGTGCTTGCAAGGATGGCTATTATAAGAATTCGGATGCTGTTGCAACTGCA
GACTCCTGTATAGCATGTGAAGATGCCAACTGTGCCACATGTGGAGGAGCTGGTGAAAACAAATGTACA
AAATGTATAGACGGATACTTTGTTGGAGCAACTGGAAATGAAGGTGGGTGCATAAAATGTGACGCTACC
ACAGGGCCTAATAGCTACAAAGGAGTTGCTGGATGTGCTAAATGTGAAAAGCCAAAGAACGCTGGTCCT
GCAAAGTGCATTGAATGTGCTGCTGATTATTTGAAAACAGAAGCAGATGAACAAACGTCTTGCGTTAGC
GAAGCCGTGTGCAGAGAAGGCAAGACGCACTTCCCCACTACTGACAGCGCTGGTGGTAACAAGAAGGTA
TGCGTAAGTTGTGGCACAACGAATAATGGCGGCATAGAAAACTGTGGAGAATGCACCTCTAAGGAAAGC
GCTGCACGGGCAGGGACAGAGATCACCTGCACCAAATGCTCTAGCAATAATCTGAGCCCCCTGGGAGAC
GCGTGTCTAACAGACTGCCCTGCCGGAACGTATGCCGTTAGTGGCGACAGCGGCAGTGTCTGCAAGCCC
TGTCACAACACGTGCGCCCGCTGCCAGACCGACGACAGGGAGACTTCCTGCACGGCCTGCTcCCCTGGA
TACTCCCTTCTGTATGAGTCCAACGGAGCAACTGGGAGGTGCGTCAAGGAGTGCACTGGTGCGTTCATT
ACCAACTGTGCGGACGGGCAGTGCACGGCTAACGTCGGGGGTGCGAAGTACTGCACCCAGTGCAAGGAC
GGGTACGCCCCGATCGACGGGATCTGTACAGCGGTGGCAGCTGCCGGGAGAGACGTGAGCGTGTGCACG
GCCACAGGTGGCAAGTGCACGGCATGTACAGGCAACTATGCGTTATTATCAGGTGGATGTTATAACACA
CAAACACTTCCTGGAAAGTCAGTATGTAAAGCCGTGGCTAATAGCAATGACGGGAAATGCAAAACATGT
GCCAATGGTCAAGCACCAGATCCTGCTACTAATTTCTGCCCATTGTGTGATTCAACTTGTGCAGAATGT
TCAACTAAAAATGATGCTGATGCTTGTACAAAATGTTTTCCAGGATACTATAAAACAGGAAATAAGTGT
ATCAAATGTACAGAAAGTAGTAATAACGGAAAAAAGATCGATGGAATACCTGATTGTTTAAGTTGTGAA
GCACCGATTAATACTGGTCCTGcCATCTGCTACGTTAAAACGGATGGCACTAGCGATGATAACAGCGGC
AATGGTGGAGACAGCACCAACAAGAGCGGCCTTTCCACTGGC

| | |
|---|---|
| Variant-specific surface | Giardia lamblia) |
| protein (VSP) WB/9B10-B | EMBL AAK97086.1 |

Protein Sequence (SEQ ID NO: 3)
MFMSFVLAGVLVQIAWAGKATERAAQCADNTNCAEEACNVLIGGKLYCSRCNTGFVPINGQCADKEGAT
DQCKDGSGGDTADQTCGQCAEQTFMYKGGCYEAAQQPGQTMCQAADAGVCTQAAQGYFIPPGADASHQS
VIPCGDEEGITVKNDKKYKGVLHCTRCYAPTEAADANAKAATCTACGDSKIVKTAKDSATSCVTEEECT
GTKTCKTCAEGTSDGCATCEKGADGAVACKTCGSNKKVQPNKKGCIAKCPETVSAEKDGVCECVEGYVP
DNAGTGCTKKPDPQCNTPGCKTCSEPKTSKEVCTECEDPKALTPTGQCIYGCEHLEGYYEGTSEGGKKA
CKKCEVENCLLCNGQGQCETCKDGYYKSGAACAKCNTSCKTCANGNSNGCTSCEPKQVLSYEGEGTGTC
KPGCKPVSGGKDGTCKSCDLNIDGTSYCSACNVGTEYPENGVCVKKSARTASCQAEPSNGVCGTCARGF
FRMNGGCYETTKLPGKSVCEEVASAGDTCQTPADGYKLNNGALITCSAGCKTCTSQDQCDTCKAGYAKT
GGNTKKCVPCATGCSECNADDATKCTVCAAGYYLSKEKCIACDKSDGGSITGVANCANCAPPTNNKGPV
LCYLIQNTNRSGLSTG
DNA Sequence (SEQ ID NO: 5)
ATGTTTGGCAGTTTTGTTCTCGCGGGGGTACTCGTCCAGATTGCATGGGCAGGAAAAGCAACAGAGCGC
GCGGCTCAATGCGCAGATAACACTAATTGCGCAGAGGAAGCATGCAACGTTCTGATCGGTGGTAAATTG
TATTGCTCTCGATGTAACACAGGATTTGTTCCTATCAATGGACAATGTGCAGACAAAGAAGGTGCAACA
GATCAGTGCAAAGATGGCTCCGGAGGCGATACAGCTGATCAGACCTGTGGACAGTGCGCCGAGCAGACT
TTCATGTACAAGGGCGGCTGTTACGAAGCAGCCCAGCAGCCCGGACAGACCATGTGTCAGGCGGCAGAT
GCTGGAGTATGCACACAAGCCGCGCAAGGATACTTCGTGCCGCCGGGCGCAGACGCCTCTCACCAATCG
GTCATACCATGCGGAGACGAAGAGGGAATAACAGTTAAGAACGATAAAAAGTACAAGGGCGTGCTGCAC
TGCACTCGGTGTTACGCTCCCACAGAAGCAGCAGATGCTAACGCCAAGGCCGCCACGTGTACTGCGTGC
GGCGATAGCAAGATCGTCAAGACAGCCAAGGACTCAGCCACCTCCTGCGTGACAGAAGAAGAGTGCACC
GGCACCAAGACGTGCAAGACGTGCGCCGAGGGGACCTCCGACGGGTGTGCGACGTGCGAGAAGGGCGCC
GATGGAGCAGTCGCCTGCAAGACGTGCGGGTCTAATAAGAAGGTCCAGCCAAACAAGAAGGGGTGCATA
GCAAAGTGCCCGGAGACGGTGAGTGCCGAGAAGGATGGCGTTTGTGAGTGCGTCGAGGGCTACGTTCCC
GACAACGCGGGCACCGGGTGCACGAAGAAGCCCGACCCCCAGTGCAACACCCCCGGCTGCAAGACGTGC
AGTGAGCCGAAGACAAGCAAGGAGGTGTGCACAGAGTGCGAAGACCCCAAGGCCCTCACGCCCACGGGC
CAGTGCATCTACGGTTGTGAGCACCTGGAAGGCTACTACGAGGGCACCAGCGAGGGGGGCAAGAAGGCC
TGCAAGAAGTGCGAGGTCGAGAACTGCCTCCTGTGCAACGGGCAAGGACAGTGCGAGACCTGCAAGGAC
GGGTACTACAAGAGCGGAGCCGCCTGTGCCAAGTGCAATACCTCGTGCAAGACGTGCGCGAACGGGAAC
TCCAACGGGTGCACGAGCTGCGAGCCTAAGCAGGTCCTCAGCTACGAAGGAGAGGGCACGGGGACGTGC
AAGCCAGGCTGCAAGCCAGTGAGCGGCGGCAAGGATGGAACGTGCAAGAGCTGCGACCTGAACATAGAC
GGGACAAGCTACTGTTCTGCCTGTAACGTGGGCACGGAGTATCCAGAGAACGGCGTGTGCGTCAAGAAG
TCGGCCCGCACAGCCTCCTGCCAGGCAGAACCGAGCAATGGTGTGTGCGGGACATGTGCAAGGGGCTTC
TTCCGCATGAACGGGGGCTGCTACGAAACGACCAAACTCCCTGGAAAGAGCGTCTGTGAGGAGGTAGCA
TCGGCCGGCGATACCTGTCAGACTCCGGCCGACGGATACAAGCTGAATAATGGCGCGCTCATCACTTGC
TCGGCCGGATGTAAGACGTGCACCAGCCAGGACCAGTGCGACACGTGTAAGGCTGGATATGCTAAGACT
GGCGGTAACACTAAGAAGTGCGTTCCCTGCGCCACTGGGTGCTCCGAGTGCAATGCGGACGACGCCACC
AAGTGCACGGTGTGCGCTGCAGGGTACTACCTGTCCAAAGAAAAGTGCATAGCATGCGACAAGAGCGAC
GGCGGATCCATCACCGGCGTCGCCAACTGCGCCAACTGCGCTCCCCCAACCAACAATAAAGGGCCTGTC
CTCTGCTACCTCATACAGAACACCAACAGGAGCGGGCTTTCCACG

VSP Carriers from VSP-like Domains

[0121] In some embodiments, a VSP carrier comprises a VSP sequence chosen from among VSP-like domains, fragments, variants or derivatives thereof from microorganisms other that Giardia. These VSP-like proteins share sequence homology and biochemical properties with Giardia VSPs. In some embodiments, VSP-like sequences selected to be used as VSP carriers comprise multiple CXXC motifs. In some embodiments, such multiple CXXC motifs are separated by 5 to 8 amino acids.

[0122] Alignment of the sequence of the extracellular domain of the Giardia VSP1267, used herein as an exemplary VSP carrier, with other VSP-like molecules sequences has led to observe the presence of multiple CXXC motifs, notably separated by 5 to 8 amino acids, in proteins belonging to Paramecium, Tetrahymena and Entamoeba species. Thus, representative fragments of primary sequences of surface kinases of Entamoeba sp., and surface proteins of Paramecium sp. and Tetrahymena sp. predict a conserved domain containing CXXC motifs in a VSP-like architecture (compared with Giardia VSP 1267, 9B10 (SEQ ID NO:3), and H7 as responsible for resistance to pH, temperature and proteolytic digestion).

[0123] In one embodiment, the Tetrahymena microorganism is Tetrahymena thermophila. In another embodiment, the Entamoeba microorganism is Entamoeba histolytica. In another embodiment, the Paramecium microorganism is Paramecium tetraurelia.

[0124] In one embodiment, the VSP carrier comprises the extracellular domain of a VSP-like protein, or a fragment, variant or derivative thereof (since said extracellular domain is the amino-terminal cysteine rich region comprising multiple CXXC motifs of the Giardia VSP protein). In another embodiment, the VSP carrier comprises only the extracellular domain of a VSP-like protein, or fragment, variant, or derivative thereof.

[0125] Thus, in some embodiments, the VSP carrier is a fragment, analog or derivative of a VSP-like protein comprising 2, 3, 4, 5, 6, 7, 8, 9, 10, 11, 12, 13, 14, 15, 16, 17, 18, 19, 20, 21, 22, 23, 24, 25, 26, 27, 28, 29, 30, 31, 32, 33, 34, 35, 36, 37, 38, 39 or 40 CXXC motifs. In some embodiments, the VSP carrier comprises at least about 40, at least about 50, at least about 60, at least about 70, at least 80, about 90 or at least about 100 CXXC motifs from a VSP-like protein.

### VSPs as Therapeutic Agent Carriers

[0126] The VSP carriers can be used to deliver therapeutic agents to a subject in need thereof. Thus, in some embodiments, the present disclosure provides a therapeutic composition comprising a VSP carrier and a therapeutic agent. This therapeutic composition can be formulated, for example, for oral administration. In some embodiments, the therapeutic composition is formulated for mucosal administration. As disclosed above, the VSP carrier can comprise without limitation a VSP, a VSP-like protein, a VSP or VSP-like protein fragment, a VSP or VSP-like protein derivative, or a combination of two or more of said VSP carriers. In specific embodiments, the VSP carrier comprises a VSP from Giardia (e.g., VSP1267) or a fragment thereof, e.g., a VSP extracellular domain or a fragment of such extracellular domain.

[0127] In some embodiments, the VSP carrier comprises a VSP protein sequence and further comprises a heterologous moiety, for example, a purification tag such as a Hi6 tag. In other embodiments, the heterologous moiety can be a protein, peptide, polymer, etc. that can improve a pharmokinetic or pharmacodynamic property such as half-life. In a specific embodiment, the VSP carrier is SEQ ID NO:1, i.e., the extracellular domain of Giardia VSP1267, including the N-terminal signal peptide, and a C-terminal His6 tag.

[0128] Therapeutic agents that can be delivered by a VSP carrier include biological agents. The term “biological agent” includes both proteins and non-protein therapeutic agents. Exemplary non-protein therapeutic agents include polysaccharides, lipids, drugs (e.g., small molecule drugs), nucleic acids (e.g., oligonucleotides), lipopolysaccharides, ribozymes, genetic materials, prions, viruses, etc.

[0129] In some embodiments of the present invention, the therapeutic agent is a pharmacologically active polypeptide. In some embodiments, the polypeptide is a bioactive peptide, e.g., a cytokine, an interleukin (e.g., IL-2 or IL-10), a hormone (e.g., parathormone), a growth factor, or a receptor. In specific embodiments, the bioactive peptides can be, without limitation, insulin, human growth hormone, glucagon, parathormone, IL-2, IL-10, as well as fragments, analogs, derivatives or variants thereof, or combinations of two or more of these bioactive peptides. The examples provided above are non-limiting, and it is contemplated that a VSP carrier can be used to delivered other bioactive peptides and proteins. For example, VSP carriers can be used for oral or mucosal delivery of proteins comprising antigen-binding domains such antibodies and fragments thereof (e.g., scFv's or scFv-comprising molecules).

[0130] In some specific embodiments, the bioactive peptide is insulin, e.g., a natural insulin, a recombinant insulin, or an insulin analog. In some embodiments, the insulin analog is a fast-acting insulin (e.g., insulin aspart), a long-lasting insulin (e.g., insulin glargine) or a combination thereof. Numerous insulin analogs are known in the art.

[0131] Therapeutics agents can also include classical low molecular weight therapeutic agents commonly referred to as drugs, including but not limited to antineoplastic, immunosupressants, antioproliferatives, antithrombins, antiplatelet, antilipid, anti-inflammatory, angiogenic, antiangiogenic, vitamins, ACE inhibitors, vasoactive substances, antimitotics, metalloproteinase inhibitors, NO donors, estradiols, or antisclerosing agents, alone or in combination. In some embodiments, the drug is a drug poorly soluble under aqueous conditions, for example an antibiotic.

[0132] The therapeutic agent can also be a compound that needs to be activated in order to be therapeutically active, e.g., a prodrug or a zymogen. In such embodiments, the therapeutic agent is metabolized into the desired drug or biological agent after it has been administered to a subject in combination with a VSP carrier.

[0133] In some embodiments, the VSP carrier is bound directly to the therapeutic agent. In other aspects, the VSP carrier is bound to a vector particle containing the therapeutic agent. Accordingly, the vector particle can be a viral particle, a virus-like particle (VLP), a nanoparticle, or a liposome. In one particular aspect, the vector particle is a viral particle displaying at its surface the therapeutic agent. In another aspect, the vector particle is a viral which does not display the therapeutic agent on its surface. In one particular aspect, the vector particle is a VLP displaying at its surface the therapeutic agent. In another aspect, the vector particle is a VLP encapsulating the therapeutic agent. In one particular aspect, the vector particle is a nanoparticle displaying at its surface the therapeutic agent. In another aspect, the vector particle is a nanoparticle encapsulating the therapeutic agent. In one particular aspect, the vector particle is a liposome displaying at its surface the therapeutic agent. In another aspect, the vector particle is a liposome encapsulating the therapeutic agent. In another particular aspect, the therapeutic agent is contained within the surface of the vector particle, e.g., within a lipid bilayer in a liposome.

[0134] In a particular embodiment, the vector particle is a virus-like particle (VLP). Where virus-like particles are being used, they can be prepared according to techniques known in the art and for example as described in Intl. Pat. Appl. Publ. No. WO 2002/34893, which is incorporated therein by reference in its entirety. In some embodiments, the VLP displays at its surface a VSP carrier and a therapeutic agent. Thus, in some embodiments, a VSP carrier can be bound to a therapeutic agent exposed at the surface of the VLP.

[0135] The VSP carrier according to the invention can form a protecting surface (as it occurs naturally in the parasite trophozoites) that allows for the correct delivery of the therapeutic agent into the mucosa (e.g., intestinal mucosa), without suffering degradation in the digestive tract.

[0136] In certain embodiments, the VSL carriers provided herein are not covalently attached to the therapeutic agents via peptidic bonds. Thus, prior to administration, a VSP carrier is “combined” with at least one therapeutic agent. As disclosed above, the term “combine” refers to the process of admixing two or more components (e.g., a VSP carrier and a therapeutic agent) such that contact between the components occur and such contact allows the binding of the two or more components.

[0137] In some embodiments, a VSP carrier can be combined with one therapeutic agent. In other embodiments, a VSP carrier can be combined with more than one therapeutic agent. In some embodiments when a VSP carrier is combined with more than one therapeutic agent, the VSP carrier can bind to only one of the therapeutic agents. In other embodiments, the VSP carrier can bind to more than one of the therapeutic agents.

[0138] In some embodiments, two or more VSP carriers can be combined with one therapeutic agent. In other embodiments, two or more than two VSP carriers can be combined with more than one therapeutic agent. In some embodiments, when two or more than two VSP carriers are combined with more than one therapeutic agent, each VSP carrier can bind to only one of the therapeutic agents. In other embodiments, each VSP carrier can bind to more than one therapeutic agent.

[0139] In some embodiments, the molecule to molecule ratio of VSP carrier to therapeutic agent (VSP carrier:therapeutic agent) ranges from about 10:1 to about 1:10. In other embodiments, the molecule to molecule ratio of VSP carrier to therapeutic agent (VSP carrier:therapeutic agent) ranges from about 3:1 to about 1:3. In some embodiments, the molecule to molecule ratio of VSP carrier to therapeutic agent (VSP carrier:therapeutic agent) is 3:1. In other embodiments, the molecule to molecule ratio of VSP carrier to therapeutic agent (VSP carrier:therapeutic agent) is 1:1.

[0140] In some embodiments, the molecule to molecule ratio of VSP carrier to therapeutic agent (VSP carrier:therapeutic agent) is about 1:1, about 2:1, about 3:1, about 4:1, about 5:1, about 6:1, about 7:1, about 8:1, about 9:1, or about 10:1. In some embodiments, the molecule to molecule ratio of VSP carrier to therapeutic agent (VSP:therapeutic agent) is higher that 10:1. In some embodiments, the molecule to molecule ratio of VSP carrier to therapeutic agent (VSP carrier:therapeutic agent) is about 1:2, about 1:3, about 1:4, about 1:5, about 1:6, about 1:7, about 1:8, about 1:9, or about 1:10. In some embodiments the molecule to molecule ratio of VSP carrier to therapeutic agent (VSP:therapeutic agent) is lower than 1:10.

[0141] In some aspects, the VSP carrier and the therapeutic agent are co-administered, i.e., they are administered simultaneously to the subject, so they combine at the time of administration. In some aspects, the VSP carrier and the therapeutic agent are combined prior to administration. In some aspects, the combination of VSP carrier and therapeutic agent can take place at least about 1 minute, at least about 2 minutes, at least about 3 minutes, at least 4 minutes, at least about 5 minutes, at least about 10 minutes, at least about 15 minutes, at least about 20 minutes, at least about 25 minutes, at least about 30 minutes, at least about 45 minutes, at least about 1 hours, at least about 2 hours, at least 3 hours, at least about 4, or at least 6 hours prior to administration. In some embodiments, the VSP carrier and the therapeutic agent are combined at least 1 day, at least 2 days, at least 3 days, at least 4 days, at least 5 days, at least 6 days, or at least 7 days prior to administration. In some embodiments, a VSP carrier and a therapeutic agent are combined in a stable form that can be used days, weeks or months after combining the VSP carrier and the therapeutic agent.

### VSP as an Insulin Carrier

[0142] In certain aspects, a VSP carrier can be combined with an insulin for oral or mucosal administration to a subject.

[0143] As used herein, the term “insulin” comprises insulin analogs, natural extracted mammalian insulin (e.g., human insulin), recombinantly produced mammalian insulin (e.g., human insulin), insulin extracted from bovine and/or porcine sources, recombinantly produced porcine and bovine insulin, insulin produced in transgenic animals, and mixtures of any of these insulin products. The term is intended to encompass the polypeptide normally used in the treatment of diabetics in a substantially purified form, but encompasses the use of the term in its commercially available pharmaceutical form, which includes additional excipients. The insulin used to combine with a VSP carrier can be recombinantly produced and can be dehydrated (completely dried) or in solution.

[0144] The term “insulin analog” refers to any form of “insulin” as defined above, where one or more of the amino acids within the polypeptide chain has been replaced with an alternative amino acid and/or where or more of the amino acids has been deleted or wherein one or more additional amino acids has been added to the polypeptide chain or amino acid sequences, which act as insulin in decreasing blood glucose levels. In general, the term “insulin analogs” includes, e.g., “insulin lispro” analogs as disclosed, e.g., in U.S. Pat. No. 5,547,929, which is herein incorporated by reference in its entirety; insulin analogs including LysPro insulin and Humalog insulin and other “super insulin” analogs, wherein the ability of the insulin analog to affect serum glucose levels is substantially enhanced as compared with conventional insulin as well as hepato selective insulin analogs which are more active in liver than in adipose tissue. The term “insulin analogs” also includes chemically and enzymatically modified insulins (e.g., mammalian insulins chemically converted into human insulin), NPH insulin (e.g., the intermediate-acting isophane insulin), insulin aspart, insulin glulisine, insulin glargine, insulin detemir, insulin degludec, etc.

[0145] In some embodiments, insulin analogs are monomeric insulin analogs, which are insulin-like compounds used for the same general purpose as insulin, such as insulin lispro, e.g., any compounds which are administered to reduce blood glucose levels.

[0146] “Insulin analogs” are well known compounds. Insulin analogs are known to be divided into two categories: animal insulin analogs and modified insulin analogs (pages 716-20, chapter 41, Nolte M. S, and Karam, J. H., “Pancreatic Hormones & Antidiabetic Drugs” In Basic & Clinical Pharmacology, Katzung, B. G., Ed., Lange Medical Books, New York, 2001). Historically, animal insulin analogs include porcine insulin (having one amino acid different from human insulin) and bovine insulin (having three amino acids different from human insulin) which have been widely used for treatment of diabetes. Since the development of genetic engineering technology, modifications are made to create modified insulin analogs, including fast-acting insulin analogs or longer acting insulin analogs. Several insulin analog molecules have been on the market prior to the filing date of the subject application. For example, Eli Lilly markets a fast-acting insulin analog called “lispro” under the trade name HUMALOG® and Novo Nordisk sells another fast-acting insulin analog called “aspart” under the trade name NOVOLOG®. In addition, Aventis markets a long-acting insulin analog called “glargine” under the trade name LANTUS® and Novo Nordisk markets another long-acting insulin analog called “detemir” under the trade name LEVEMIR®. Table 41-4 of the Nolte and Karam (2001) reference cited above provides a non-limiting list of the wide range of types of molecules generically referred to as insulin.

[0147] The term insulin also encompasses insulin as defined above covalently coupled to one or more heterologous moieties that can improve pharmacokinetic and/or pharmacodynamic properties over native insulins, e.g., PEGylated insulins (see, e.g., U.S. Pat. No. 6,890,518). See also, U.S. Pat. Nos. 7,049,286; 7,470,663; 6,890,518; and U.S. Appl. Pub. Nos. US2008/0139784; US2011/0281791; US2009/0036353; US20110020871; US2009/0239785.

### VSP as a Glucagon Carrier

[0148] In certain aspects, a VSP carrier can be combined with glucagon for oral or mucosal administration to a subject.

[0149] As used herein, the term “glucagon” comprises glucagon analogs, natural extracted mammalian glucagon (e.g., human glucagon), recombinantly produced mammalian glucagon (e.g., human glucagon), glucagon extracted from bovine and/or porcine sources, recombinantly produced glucagon, glucagon produced in transgenic animals, and mixtures of any of these glucagon products. The term is intended to encompass the polypeptide normally used in the treatment of hypoglycemia (?) in a substantially purified form, but encompasses the use of the term in its commercially available pharmaceutical form, which includes additional excipients. The glucagon used to combine with a VSP carrier can be recombinantly produced. In some embodiments, glucagon can be dehydrated (completely dried) or in solution.

### VSP as a Growth Hormone Carrier

[0150] In certain aspects, a VSP carrier can be combined with a growth hormone, e.g., human growth hormone, for oral or mucosal administration to a subject.

[0151] The terms “growth hormone (GH)” refers generally to growth hormones secreted by the pituitary gland in mammals. Although not an exhaustive list, examples of mammals include human, apes, monkey, rat, pig, dog, rabbit, cat, cow, horse, mouse, rat and goat. In some embodiments of the present invention, the mammal is a human.

[0152] The terms “human growth hormone” and “hGH” are used interchangeably and refer to a protein having an amino acid sequence, structure and function characteristic of native human growth hormone. As used herein, hGH also includes any isoform of native human growth hormone, including but not limited to, isoforms with molecular masses of 5, 17, 20, 22, 24, 36 and 45 kDa (see, e.g., Haro et al., J. Chromatography B, 720, 39-47 (1998)). Thus, the term hGH includes the 191 amino acid sequence of native hGH, somatotropin, and the 192 amino acid sequence containing an N-terminal methionine (Met-hGH) and somatrem (see, e.g., U.S. Pat. Nos. 4,342,832 and 5,633,352). hGH can be obtained by isolation and purification from a biological source or by recombinant DNA methods. Met-hGH is typically prepared by recombinant DNA methodology.

[0153] The term “human growth hormone” also encompasses human growth hormone derivatives. The term “human growth hormone derivative” refers to a protein that differs by at least about 1% but not by more than about 20% from the amino acid sequence of the 191 amino acid sequence of hGH or the 192 amino acid-sequence of Met-hGH. For example, the derivative can differ by about 1% to about 20%, about 2% to about 15%, or about 5% to about 10% from the 191 amino acid sequence of hGH or the 192 amino acid-sequence of Met-hGH; the protein can differ by about 1%, about 2%, about 3%, about 4%, about 51%, about 6%, about 7%, about 8%, about 9%, about 10%, about 11%, about 12%, about 13%, about 14%, or about 15% from the 191 amino acid sequence of hGH or the 192 amino acid-sequence of Met-hGH. The differences between the derivative and the 191 amino acid hGH or the 192 amino acid Met-hGH amino acid sequence can be one or more substitutions (e.g., conservative or non-conservative substitutions), deletions, additions (e.g., insertions or amino- or carboxy-terminal additions)), modifications, or combinations thereof.

[0154] In some embodiments, an hGH derivative maintains a biological activity and/or a chemical and/or physical property of the 191 amino acid hGH or the 192 amino acid Met-hGH amino acid sequence. Likewise, in some embodiments, a formulation containing a derivative (e.g., a formulation of poly-Arg complexed crystalline hGH derivative) possesses a chemical and/or physical property of a similarly-prepared formulation containing the 191 amino acid hGH or the 192 amino acid Met-hGH amino acid sequence (e.g., a formulation of poly-Arg complexed crystalline hGH).

[0155] In various embodiments of the present disclosure, human growth hormone derivatives comprise organic cations of hGH or Met-hGH, substitution, deletion and insertion variants of biologically synthesized hGH or Met-hGH proteins, post-translationally modified hGH and Met-hGH proteins, including—without limitation—deamidation, phosphorylation, glycoslylation, acetylation, aggregation and enzymatic cleavage reactions (see, e.g., Haro et al., J. Chromatography B, 720, 39-47 (1998)), chemically modified hGH or Met-hGH proteins derived from biological sources, polypeptide analogs and chemically synthesized peptides containing amino acid sequences analogous to those of hGH or Met-hGH. Methods used to prepare hGH or Met-hGH include isolation from a biological source, recombinant DNA methodology, synthetic chemical routes or combinations thereof. Genes that encode for different DNA sequences of hGH include hGH-N and hGH-V (see, e.g., Haro et al., J. Chromatography B, 720, 39-47 (1998); Bennani-Baiti et al., Genomics, 29, 647-652 (1995)). hGH is commercially available in lyophilized form and is typically produced by recombinant DNA methods.

### Production of VSP Carriers

[0156] Recombinant expression of the VSP carriers can be achieved through the construction of an expression vector containing a polynucleotide that encodes a VSP carrier. Once a polynucleotide encoding a VSP carrier has been obtained, the vector for the production of the VSP carrier can be produced by recombinant DNA technology using techniques well known in the art.

[0157] Methods for preparing a protein by expressing a polynucleotide containing a VSP carrier-encoding nucleotide sequence are known in the art. Methods that are well known to those skilled in the art can be used to construct expression vectors containing VSP carrier coding sequences and appropriate transcriptional translational control signals. These methods include, for example, in vitro recombinant DNA techniques, synthetic techniques, and in vivo genetic recombination. The disclosure, thus, provides replicable vectors comprising a nucleotide sequence encoding a VSP carrier operably linked to a promoter.

[0158] An expression vector can be transferred to a host cell by conventional techniques and the transfected cells can then be cultured by conventional techniques to produce a VSP carrier. Thus, the invention includes host cells containing a polynucleotide encoding a VSP carrier, operably associated with a promoter. Suitable host cells include, but are not limited to, microorganisms such as bacteria (e.g., E. coli and B. subtilis), fungal cells, mammalian cells, or insect cells.

[0159] A variety of host-expression vector systems can be utilized to express the VSP carrier of the present disclosure. Such host-expression systems represent vehicles by which the coding sequences of interest can be produced and subsequently purified, but also represent cells which can, when transformed or transfected with the appropriate nucleotide coding sequences, express a VSP carrier in situ. These include but are not limited to microorganisms such as bacteria (e.g., E. coli and B. subtilis) transformed with recombinant bacteriophage DNA, plasmid DNA or cosmid DNA expression vectors containing VSP carrier coding sequences, fungal cell system (e.g., Saccharomyces or Pichia), mammalian cell systems (e.g., COS, CHO, BHK, 293, NSO, and 3T3 cells), or insect cell systems. Once a VSP carrier has been produced by recombinant expression, it can be purified by any method known in the art for purification of a protein.

[0160] In some embodiments, a DNA encoding a VSP carrier is codon optimized for expression in an insect protein expression system, e.g., a baculovirus expression system. In some embodiments, a VSP carrier is expressed in an insect protein expression system, e.g., a baculovirus expression system.

### Pharmaceutical Compositions

[0161] In another aspect, the present disclosure provides a therapeutic composition including, but not limited to, a pharmaceutical composition, containing one or more than one VSP carrier combined with one or more than one therapeutic agents, formulated together with a pharmaceutically acceptable excipient. Such compositions can include one or a combination of two or more different VSP carriers. For example, a pharmaceutical composition can comprise a combination of VSP carriers that bind to the same therapeutic agent or to more than one therapeutic agent. These therapeutic agents can have complementary activities. In a specific aspect, a pharmaceutical composition comprises a single VSP carrier. In a specific embodiment, a pharmaceutical composition comprises more than one VSP carriers.

[0162] Pharmaceutical compositions comprising one or more VSP carriers also can be administered in combination therapy. For example, the combination therapy can include a pharmaceutical composition which comprises at least one VSP carrier combined with at least one therapeutic agent, combined with at least one other therapy wherein the therapy can be immunotherapy, chemotherapy, radiation treatment, or drug therapy. Pharmaceutical compositions of the invention can include one or more pharmaceutically acceptable salts.

[0163] Examples of suitable aqueous and non-aqueous carriers that can be employed in contemplated pharmaceutical compositions of the invention include water, ethanol, polyols (such as glycerol, propylene glycol, polyethylene glycol, and the like), and suitable mixtures thereof, vegetable oils, such as olive oil, and injectable organic esters, such as ethyl oleate. Proper fluidity can be maintained, for example, by the use of coating materials, such as lecithin, by the maintenance of the required particle size in the case of dispersions, and by the use of surfactants.

[0164] In another aspect, pharmaceutical compositions comprising a VSP carrier can also contain agents such as preservatives, wetting agents, emulsifying agents and dispersing agents. Prevention of presence of microorganisms can be ensured both by sterilization procedures and by the inclusion of various antibacterial and antifungal agents, for example, paraben, chlorobutanol, phenol sorbic acid, and the like. It can also be desirable to include isotonic agents, such as sugars, sodium chloride, and the like into the compositions. In addition, prolonged absorption can be brought about by the inclusion of agents which delay absorption such as aluminum monostearate and gelatin.

[0165] Pharmaceutically acceptable carriers include sterile aqueous solutions or dispersions and sterile powders for the extemporaneous preparation of sterile injectable solutions or dispersion. The use of such media and agents for pharmaceutically active substances is known in the art. Except insofar as any conventional media or agent is incompatible with the active compound, use thereof in the pharmaceutical compositions of the invention is contemplated. Supplementary active compounds can also be incorporated into the pharmaceutical compositions of the invention.

[0166] Actual dosage levels of the active ingredients in pharmaceutical compositions comprising a VSP carrier can be varied so as to obtain an amount of the active ingredient which is effective to achieve the desired therapeutic response for a particular patient, composition, and mode of administration, without being toxic to the patient. The selected dosage level will depend upon a variety of pharmacokinetic factors including the activity of the particular compositions employed, or the ester, salt or amide thereof, the route of administration, the time of administration, the rate of excretion of the particular compound being employed, the duration of the treatment, other drugs, compounds and/or materials used in combination with the particular compositions employed, the age, sex, weight, condition, general health and prior medical history of the patient being treated, and like factors well known in the medical arts.

[0167] A therapeutically effective dosage of pharmaceutical composition comprising a VSP carrier can be indicated by a decrease in severity of disease symptoms, an increase in frequency and duration of disease symptom-free periods, or a prevention of impairment or disability due to the disease affliction. A therapeutically effective dose can also prevent or delay onset of disease. Accordingly, any clinical or biochemical monitoring assay can be used to determine whether a particular treatment is a therapeutically effective dose. One of ordinary skill in the art would be able to determine such amounts based on such factors as the subject's size, the severity of the subject's symptoms, and the particular composition or route of administration selected.

[0168] Therapeutic compositions comprising a VSP carrier are particularly well suited for oral administration. Alternatively, therapeutic compositions comprising a VSP can be administered via a non-parenteral route, such as a topical, epidermal or mucosal route of administration, for example, intranasally, buccally, vaginally, rectally, sublingually or topically. Of course, therapeutic compositions comprising a VSP carrier can be administered via one or more alternative routes of administration using one or more of a variety of methods known in the art. As will be appreciated by the skilled artisan, the route and/or mode of administration will vary depending upon the desired results.

[0169] In certain embodiments, therapeutic compositions comprising VSP carriers are formulated for an oral or a mucosal administration. The doses used for the oral or a mucosal administration can be adapted as a function of various parameters, and in particular as a function of the mode of the relevant pathology, or alternatively of the desired duration of treatment.

[0170] Upon formulation, pharmaceutical compositions comprising VSP carriers can be administered in a manner compatible with the dosage formulation and in such amount as is therapeutically effective. The formulations are easily administered in a variety of dosage forms, such as the type of, e.g. tablets or other solids for oral or a mucosal administration; time release capsules; and any other form currently used. Accordingly, the pharmaceutical composition may be in the form of a spray, an aerosol, a mixture, a suspension, a dispersion, an emulsion, a gel, a paste, a syrup, a cream, an ointment, implants (ear, eye, skin, nose, rectal, and vaginal), intramammary preparations, vagitories, suppositories, or uteritories). In certain embodiments, the use of liposomes is contemplated. The formation and use of liposomes are known to those of skill in the art.

[0171] More particularly, the pharmaceutical composition is formulated so that the therapeutic agent in the therapeutic composition of the invention is resistant to enzymatic and chemical degradation of the upper gastrointestinal tract, when necessary. Moreover, in certain embodiments, a VSP carrier should be able to attach to cells, more particularly epithelial cells of the gut.

### Methods

[0172] The VSP carriers of the present disclosure have in vitro and in vivo therapeutic and diagnostic utility. For example, the VSP carriers can be used to administer therapeutic agents or diagnostic reagents to cells in culture, e.g., in vitro or ex vivo, or in a subject, e.g., in vivo, to treat, prevent or diagnose a variety of disorders. A disease, a disorder or physiologic conditions considered in the invention can be, but it is not limited to, hormone deficiencies, cancers, immunological diseases, autoimmune diseases, allograft rejections, viral diseases, such as influenza or AIDS, parasitic diseases, bacterial infections, or allergies.

[0173] The present disclosure provides a method of delivering a therapeutic agent to a target location in a subject comprising the administration of a therapeutic composition comprising a VSP carrier and a therapeutic agent. In some specific embodiments of the disclosed method of delivering, the VSP carrier is the VSP1267 carrier and the therapeutic agent is a bioactive peptide such as insulin, glucagon, or hGH.

[0174] Also provided is a method of treating a disease or condition in a subject comprising administering to said subject an effective amount of a therapeutic composition comprising a VSP carrier and a therapeutic agent. In some embodiments, the disease or condition is a hormone deficiency. In specific embodiments, the hormone deficiency is an insulin deficiency. In some embodiments, the insulin deficiency is type 1 diabetes. In some specific embodiments, the method of treating the hormone deficiency comprises administering the VSP1267 carrier and a bioactive peptide such as insulin, glucagon, or hGH.

[0175] The present disclosure also provides a method of treating a disease or condition in a subject comprising combining a VSP carrier and a therapeutic agent, wherein the VSP carrier can bind to the therapeutic agent, and administering an effective amount of the combination of VSP carrier and therapeutic agent to the subject. In some specific embodiments, the VSP carrier is the VSP1267 carrier and it is combined with a therapeutic agent which is a bioactive peptide such as insulin, glucagon, or hGH.

[0176] The present disclosure also provides a method of making an orally or mucosally deliverable composition, comprising combining a VSP carrier and a therapeutic agent, wherein the VSP carrier can bind to the therapeutic agent. In some specific embodiments, the orally or mucosally deliverable composition comprises the VSP1267 carrier combined with a therapeutic agent which is a bioactive peptide such as insulin, glucagon, or hGH.

[0177] Also disclosed herein is a method of making an injectable composition suitable for oral or mucosal administration comprising combining a VSP carrier and a therapeutic agent, wherein the VSP carrier can bind to the therapeutic agent. In some specific embodiments, the orally or mucosally deliverable injectable composition comprises the VSP1267 carrier combined with a therapeutic agent which is a bioactive peptide such as insulin, glucagon, or hGH.

[0178] Also provided in the present disclosure is a method of increasing resistance of a therapeutic agent to enzymatic degradation comprising combining a VSP carrier and a therapeutic agent, wherein the VSP carrier can bind to the therapeutic agent, and wherein combining the VSP carrier and the therapeutic agent results in improved resistance of the therapeutic agent to enzymatic degradation. In some specific embodiments, the VSP carrier is the VSP1267 and the therapeutic agent is a bioactive peptide such as insulin, glucagon, or hGH.

[0179] The present disclosure also provides a method of increasing the resistance of a therapeutic agent to pH denaturation comprising combining the therapeutic agent with a VSP carrier, wherein the VSP carrier can bind to the therapeutic agent, and wherein combining the VSP carrier and the therapeutic agent results in improved resistance of the therapeutic agent to pH denaturation. In some specific embodiments, the VSP carrier is the VSP1267 and the therapeutic agent is a bioactive peptide such as insulin, glucagon, or hGH.

[0180] The present disclosure also provides a method of increasing simultaneously the resistance of a therapeutic agent to enzymatic degradation and its resistance to pH denaturation comprising combining the therapeutic agent with a VSP carrier, wherein the VSP carrier can bind to the therapeutic agent, and wherein combining the VSP carrier and the therapeutic agent results in an increased resistance of a therapeutic agent to enzymatic degradation and increased resistance to pH denaturation. In some embodiments, the combination of the VSP carrier and the therapeutic agent increases the therapeutic agent's resistance to pH-mediated degradation when exposed to a pH ranging between about 1 and about 2, or between about 2 and about 3, or between about 3 and about 4, or between 4 and about 5, or between about 5 and about 6, or between about 6 and 7, or between about 7 and about 8, or between about 8 and about 9, or between about 9 and about 10, or between about 10 and about 11, over between about 11 and about 12, or between about 12 and about 13, or between about 13 and about 14. In some specific embodiments, the VSP carrier is the VSP1267 and the therapeutic agent is a bioactive peptide such as insulin, glucagon, or hGH.

[0181] Also provided is a method of improving the attachability of a therapeutic agent to mucosal epithelial cells comprising combining a therapeutic agent with a VSP carrier, wherein the VSP carrier can bind to the therapeutic agent, and wherein combining the VSP carrier and the therapeutic agent results in improved attachability of the therapeutic to mucosal epithelial cells. In some specific embodiments, the VSP carrier is the VSP1267 and the therapeutic agent is a bioactive peptide such as insulin, glucagon, or hGH. In some embodiments, the mucosal epithelial cells are intestinal epithelial cells. In other embodiments, the mucosal epithelial cells as gastric epithelial cells. In other embodiments, the mucosal epithelial cells are oral epithelial cells. Mucosal delivery, i.e., delivery of a therapeutic agent to mucous tissue by a VSP carrier refers, e.g., to delivery to bronchial and other respiratory tract mucosal tissues, gingival, lingual, nasal, oral, gastrointestinal, and genitourinary tract mucosal tissues.

[0182] The invention also provides methods of using VSP carriers in diagnostics. In some embodiments, a VSP carrier can be combined with one or more than one diagnostic reagents. The invention also provides methods of imaging specific targets using VSP carriers. In one embodiment, a VSP carrier is combined imaging agents such as green-fluorescent proteins, other fluorescent tags (Cy3, Cy5, Rhodamine and others), biotin, or radionuclides to be used in methods to image the presence, location, or progression of a specific target. In some aspects, the method of imaging a target comprising a VSP carrier is performed by MRI, PET scanning, X-ray, fluorescence detection or by other detection methods known in the art.

[0183] Therapies comprising the use of VSP carriers can be combined with conventional therapies suitable for the prevention, treatment, reduction or amelioration of disease or symptoms thereof. Exemplary conventional therapies can be found in the Physician's Desk Reference (56th ed., 2002 and 57th ed., 2003). In some embodiments, therapies using VSP carriers can be combined with chemotherapy, radiation therapy, surgery, immunotherapy with a biologic (e.g., an antibody or antigen-binding fragment thereof, or a peptide, e.g., a bioactive peptide), small molecules, or another therapy known in the art. In some embodiments, the combinatorial therapy is administered together with the therapy comprising the use of VSP carriers. In other embodiments, the combinatorial therapy is administered separately from the therapy comprising the use of VSP carriers.

[0184] The present disclosure also provides methods of monitoring disease progression, relapse, treatment, or amelioration using the VSP carriers. In one embodiment, methods of monitoring disease progression, relapse, treatment, or amelioration is accomplished by the methods of imaging, diagnosing, or contacting a compound/target with a VSP carrier as presented herein.

[0185] The present disclosure also provides a method to increase the solubility of a poorly soluble drug (e.g., a small molecule drug) by combining it with a VSP carrier, wherein the binding of the poorly soluble drug to the VSP carrier increases the solubility of the drug. In some embodiments, the poorly soluble drug is a small molecule drug used to treat a hormonal imbalance (e.g., an antidiabetic small molecule drug). In other embodiments, the poorly soluble drug is an antibiotic. In some embodiments, the antibiotic is an aminoglycoside antibiotic, e.g., amikacin. In other embodiments, the antibiotic is a glycopeptide antibiotic, e.g., vancomycin.

### Kits

[0186] Also provided is a pharmaceutical pack or kit comprising one or more containers filled with one or more of the pharmaceutical compositions disclosed herein. Optionally associated with such container(s) can be a notice in the form prescribed by a governmental agency regulating the manufacture, use or sale of pharmaceuticals or biological products, which notice reflects approval by the agency of manufacture, use or sale for human administration. The present disclosure provides kits that can be used in the above methods of treatment and administration. In one aspect, a kit comprises a VSP carrier, preferably in a purified form, in one or more containers. In some embodiments, the kit comprises a VSP carrier combined with a therapeutic in one container. In other embodiments, the kit comprises a VSP carrier and a therapeutic agent in different containers.

### EQUIVALENTS

[0187] Those skilled in the art will recognize, or be able to ascertain using no more than routine experimentation, many equivalents to the specific embodiments of the invention described herein. Such equivalents are intended to be encompassed by the following claims.

[0188] All publications, patents, and patent applications referred to herein are expressly incorporated by reference in their entireties.

### EXAMPLES

### Example 1

### VSP Resistance to Variable pH and to Digestion by Intestinal Proteases

[0189] VSPs are integral membrane proteins of protozoan parasites, e.g., Giardia lamblia, with a variable extracellular region rich in CXXC motifs, a unique transmembrane hydrophobic regions and a short, 5 amino acid-long cytoplasmic tail (FIG. 1C). Each trophozoite (the active, motile feeding stage of the Giardia parasite) expresses a single VSP on its surface, as shown in FIGS. 1A and 1B. FIG. 1A shows phase contrast (left panel) and immunofluorescence (right panel) assays showing that, from a group of Giardia trophozoites only one expresses on its surface a given VSP, as demonstrated by surface labeling with an anti-VSP specific monoclonal antibody, while the other cells express a different surface protein. FIG. 1B shows an anti-VSP specific immunogold labeling of the surface of a trophozoite. It can be observed that the entire surface of the parasite is labeled, including the ventral disk and the flagella, generating a thick surface coat.

[0190] Purified VSPs are not toxic for cells when added to cultures and they are not toxic for the animals when administered by the oral route. Animals do not lose weight and have no diarrhea, which are commonly associated to Giardia infections (see Rivero et al., Nat. Med. 16(5):551-7 (2010)). Despite their lack of toxicity, to be useful as therapeutic agent carriers, VSPs must be able to survive the harsh conditions of the GIT.

[0191] To determine whether VSPs are resistant to variable pH and to proteolytic digestion, two different Giardia isolates (clonal trophozoite populations) were treated with trypsin and with variable pH and the effect of those conditions on the VSP expressed by each isolate were monitored using immunofluorescence assays.

[0192] For the trypsin resistance assay, Giardia parasites were resuspended in PBS at pH 7.4 and treated for 90 minutes with variable concentrations of trypsin similar of those found in the upper small intestine. Afterwards, the parasites were washed, and incubated with two monoclonal antibodies, each one recognizing the particular VSP expressed by each of the two isolates tested: the GS/M isolate and the WB isolate. The monoclonal antibody G10/4 recognized a conformational epitope in VSPH7 of the GS/M isolate. The monoclonal antibody 9B10 detected a non-conformational epitope in VSP9B10 of the WB isolate. The antibodies agglutinated the trophozoites and labeled the surface of the parasites.

[0193] It was observed that after incubation with 100 μg/ml or 200 μg/ml of trypsin, the presence of both VSP proteins was still detectable by the monoclonal antibodies, indicating that both VSPs survived trypsinization (FIG. 2A).

[0194] For the pH resistance assay, Giardia parasites were resuspended in RPMI cell culture medium at variable pHs, from pH 1 to pH 10, in 1 pH unit increments (only pH 1, 3, 5 and 10 are shown in FIG. 2B). Giardia parasites were kept at the different pHs for 90 minutes, washed, and then incubated with the corresponding monoclonal antibody. In all cases the VSP epitopes in VSPH7 and VSP9B10 remained intact as determined by immunofluorescence microscopy, indicating that both VSPs survived exposure to variable pH without undergoing chemical degradation (FIG. 2B).

[0195] Resistance to proteolytic digestion was also demonstrated using Western Blot analysis of VSPs after treating trophozoites with trypsin (FIG. 3). Giardia parasite clones WB-9B10, WB-1267 and GS-H7 (expressing, respectively, the VSP9B10, VSP1267 and VSPH7 VSPs) were resuspended in PBS at pH 7.4 and treated for 90 min at 37° C. with variable concentrations of trypsin (200 μg/ml and 2 mg/ml). Then, the parasites were lysed and equivalent protein amounts were applied to each lane in the SDS-PAGE gels. FIG. 3 shows that the three VSPs tested were able to survive exposure to trypsin.

[0196] These results demonstrated that VSPs are resistant to chemical and proteolytic degradation and can survive environmental conditions similar to those found in the GIT.

### Example 2

### VSP Attachment to Enteric Mucosa after Oral Administration

[0197] To determine whether VSPs were capable of attaching to the enteric mucosa after oral administration, in vivo assays were conducted in gerbils. A group of gerbils was infected with Giardia parasite clone WB-9B10 trophozoites (FIG. 4, panel A), a second group was not infected (FIG. 4, panel B), and a third group of gerbils was immunized with the entire repertoire of VSPs purified from transgenic trophozoites (FIG. 4, panel C). Tissue sections from each group were incubated with the anti-VSP9B10 monoclonal antibody, detected with anti-mouse immunoglobulins labeled with horseradish peroxidase, developed with 3,3′ diaminobenzidine, and counterstained with hematoxylin/eosin.

[0198] A strong difference on the level of staining of the surface of the gut epithelial cells between infected or immunized (panels A and C) compared to non-infected animal (panel B) was observed, indicating that VSPs remained attached to the enteric mucosa after oral administration.

[0199] These results, together with the results of Example 1 indicated that VSPs survived pH and enzymatic conditions in the GIT and successfully attached to gut epithelial cells. These physicochemical properties would allow VSPs to shuttle drugs through the GIT, and the prolonged stay in the GIT should allow the passage of drugs carried by the VSPs from the GIT to the bloodstream.

### Example 3

### Recombinant Production of VSP1267 VSP Carrier

[0200] To obtain the VSP carrier to be used for the oral administration experiments, a modified VSP protein was designed and recombinantly produced. The full-length VSP contained a cysteine-rich extracellular region containing numerous CXXC motifs. A DNA construct in which the transmembrane region and the cytoplasmic 5 residues of the VSP1267 were eliminated and a His6 protein purification tag was added at the carboxy terminal (FIG. 5A) was generated (SEQ ID NO:1). The signal sequence is underlined in FIG. 5A. The amino acids in the His6 protein purification tag are show in a box in FIG. 5A.

[0201] Initially, the VSP carrier was recombinantly expressed in E. coli BL21 using the pET28 expression vector (Novagen). Protein production was subsequently improved by codon optimization of the recombinant DNA sequence for expression in baculovirus. The protein was expressed and purified by one step affinity purification using the His6 tag present in the carboxy terminal portion of the protein (FIG. 5B).

### Example 4

### Sensitivity of Commercial Insulins to Trypsin

[0202] To test in vitro the capacity of VSP carriers to protect bioactive peptides from degradation, the capacity of recombinant VSP1267 to protect insulin from conditions similar to those present in the GIT was evaluated. Natural Insulin is a bioactive peptide with a molecular mass of 5.8-6 kDa. Prior to evaluating the capacity of the VSP to protect insulin from in vivo degradation in the GIT, the sensitivity of two commercial insulins to proteolysis by trypsin and pancreatine was tested in vitro.

[0203] Two types of insulin were tested:
[0204] LANTUS®: Insulin Glargine (Sanofi-Aventis). Differs from natural human insulin in that the amino acid asparagine at position A21 is replaced by glycine and two arginines are added to the C-terminus of the B-chain, MW: 6,063 kDa). It is long-acting insulin.
[0205] NOVORAPID®: Insulin Aspart (Novo/Nordisk). Differs from human insulin in that the amino acid, B28, which is normally proline, is substituted with an aspartic acid residue). It is fast acting insulin.

[0206] The proteolytic profiles of NOVORAPID® and LANTUS® after preincubation of the insulins with trypsin at 100, 150, 200, 500 and 1000 μg/mL, and pancreatine at enzyme:substrate ratios of 1:1 and 1:2 are shown in FIG. 6. The insulins and their degradation products were visualized using silver staining. LANTUS® insulin was not easily degraded in the assayed experimental conditions. However, for NOVORAPID®, a trypsin dose-dependent increase in proteolytic degradation was observed.

### Example 5

### In Vivo Capacity of VSPs to Protect Insulin from Degradation

[0207] The combination of insulin with the VSP carrier VSP1267 was assayed to determine whether the VSP can (i) protect insulin from degradation when administered orally and (ii) promote its systemic biological action, namely the regulation of blood glucose levels. Accordingly, a sub-optimal oral dose of insulin was first determined, and then it was determined whether the combination of insulin at this sub-optimal dose with the VSP carrier could promote insulin's biological action (see FIG. 7).

The biological activity of insulin was measured by testing its hypoglycemic capacity. Accordingly, blood glucose levels were quantified in female Balb/c 7 week-old mice left without food intake for 2 hours. After the starvation period, the mice received 1 IU, 5 IU and 50 IU oral doses of LANTUS® (FIG. 7A) or NOVORAPID® (FIG. 7B). Blood glucose levels were determined at the indicated time points. Blood glucose levels were also quantified after the administration of an i.v. bolus of glucose, and after subcutaneous administration of 1-5 IU of insulin as a positive control. These experiments indicated that 1 IU of insulin was a sub-optimal oral dose that could be used for the follow up experiments testing the administration of insulin in combination with a VSP carrier (see FIG. 8).

[0208] The results shown in FIG. 8 demonstrate that the administration of insulin in combination with a VSP carrier promotes insulin action when administered by the oral route. In this experiment, female Balb/c mice, 7 week-old were left without food intake for 2 hours and then received doses of insulin, LANTUS® (FIG. 8A) and NOVORAPID® (FIG. 8B), at the suboptimal dose identified in FIG. 7 (1 IU) in three different formulations (i) insulin administered alone, (ii) insulin combined with VSP at a 1:1 ratio, and (iii) insulin combined with VSP at a 1:3 ratio. PBS and a subcutaneous administration of insulin at 1-5 IU were used as controls. The combination of 1 IU of insulin with VSPs enhanced insulin's biological action, at a 1:1 insulin/VSP ratio for LANTUS® and at a 1:3 insulin/VSP ratio for NOVORAPID® (circled).

### Example 6

### In Vitro Protection of Human Growth Hormone (hGH) by the VSP1267 VSP Carrier

[0209] To evaluate in vitro the capacity of a VSP carrier to protect bioactive peptides from degradation, we evaluated the capacity of recombinant VSP1267 to protect human growth hormone (somatotropin, hGH) (Biosidus, Argentina), a 191 amino acids long protein, from conditions similar to those present in the GIT. Similar to the previous analysis performed with the VSPs alone, the capacity of the VSP to protect hGH from degradation caused by extreme pHs or by enzymatic proteolysis was assayed.

[0210] First, the specificity of the αHCB anti-hGH monoclonal antibody was determined by Western blot (FIG. 9). Two dilutions of the monoclonal antibody αHCB (1/3000 and 1/2000), as well as a control anti-alkaline phosphatase antibody (αMouse-AP1) were used to detect hGH (HCB: human growth hormone produced in transgenic bovines). The αHCB monoclonal antibody recognized only one band of the correct molecular weight of hGH (22.1 KDa). Different amounts of hGH (0.25, 0.5, 1, 5 and 10 μg) were used. The αHCB hGH specific monoclonal antibody was capable of detecting very low amounts of hormone at very high dilutions. The anti-mouse antibody used as control showed no reaction.

[0211] The anti-hGH monoclonal antibody was subsequently used to determine the degree of resistance of hGH to different pHs. hGH was incubated at different pHs (1.6, 2.0, 3.8, 5.0, 5.8, 7.0, 8.0, 9.0, 10.0, and 11.0) for 90 minutes. The Western blot results shown in the top panel of FIG. 10A as well as the silver staining detection of the hormone shown in the bottom panel of FIG. 10A, indicated that at higher pHs hGH remained unaltered as compared with the control. The hormone suffered auto-proteolytic processing at slightly acidic pHs that did not interfere with the recognition of anti-GH antibody (see, e.g., Such-Sanmartin et al., Growth Factors 27:255-64 (2009)). However, at very low pHs (similar to those found in the stomach) part of the hormone was highly degraded (FIG. 10A, circles).

[0212] When a VSP carrier was added to hGH at a 3:1 VSP/hGH ratio and the mixtures were incubated at different pHs (1.4, 1.96, 3.8, 4.91, 5.9, 7.01, 7.95, 8.51, 9.61 and 11.17), no significant changes respect to the hGH degradation levels of hGH in the absence of VSP were observed (FIG. 10B).

[0213] hGH was also treated for 90 min at 37° C. with several concentrations of trypsin (0, 100, 150, 200, and 500 μg/ml). The Western blot results shown in the top panel of FIG. 11A as well as the silver staining detection of the hormone shown in the bottom panel of FIG. 11A indicated that the hormone was rapidly degraded even at the lowest protease concentrations. VSP addition at a 3:1 ratio was able to protect hGH from trypsin degradation (FIG. 11B). This protective effect was observed up to a 150 μg/ml trypsin concentration.

### Example 7

### In Vivo Protection of Human Growth Hormone (hGH) Administered in Combination with a VSP Carrier

[0214] hGH serum levels were tested after oral administration, evaluating different doses and measurement times, to determine the best dose for combination with the VSP carrier VSP1267 (FIG. 11A). As in previous experiments, female Balb/c mice, 7 weeks-old, were left without food intake for 2 hours and then received the doses indicated in FIG. 12A (i.e., 50, 100, 200, 400 and 800 μg of hGH). In a parallel experiment, hGH was administered subcutaneously (FIG. 11A, inset). It was observed that hGH alone is absorbed orally, at much lower levels than subcutaneously absorption (FIG. 11A, main panel). However, this oral absorption was highly variable regarding both times and amounts. Thus, a direct relationship between absorption and these variables (time and concentration) could not be determined. Despite these results, we used a dose of 50 μg to evaluate the effect of combination of hGH with the VSP carrier.

[0215] FIG. 12 shows a time response drawing showing serum hGH levels in female Balb/c mice, 7 weeks-old, that were left without food intake for 2 hours and then received a 50 n dose of hGH in combination with a VSP carrier. Oral administration of hGH:VSP at a 1:3 ratio (50 μg of hGH combined with 150 μg of VSP) enhanced the hGH absorption when compared to the oral administration of hGH alone without a VSP carrier.

### Example 8

### In Vitro and In Vivo Protection of Parathormone in Combination with a VSP Carrier

[0216] Parathyroid hormone (PTH), parathormone or parathyrin, is secreted by the chief cells of the parathyroid glands as a polypeptide containing 84 amino acids. It acts to increase the concentration of calcium (Ca²⁺) in the blood, whereas calcitonin (a hormone produced by the parafollicular cells (C cells) of the thyroid gland) acts to decrease calcium concentration. PTH acts to increase the concentration of calcium in the blood by acting upon the parathyroid hormone 1 receptor (high levels in bone and kidney) and the parathyroid hormone 2 receptor (high levels in the central nervous system, pancreas, testis, and placenta). PTH half-life is approximately 4 minutes. It has a molecular mass of 9.4 kDa. A low level of PTH in the blood is known as hypoparathyroidism. Causes include surgical misadventure (e.g., inadvertent removal during routine thyroid surgery), autoimmune disorder, and inborn errors of metabolism. Hypoparathyroidism can be treated, e.g., with synthetic PTH 1-34 (Tireparatide). PTH can be measured in the blood in several different forms: intact PTH; N-terminal PTH; mid-molecule PTH, and C-terminal PTH, and different tests are used in different clinical situations.

[0217] To assess in vitro the capacity of VSP carriers to protect parathormone from degradation, the capacity of a VSP carrier (e.g., VSP carrier VSP1267) to protect human parathormone from conditions similar to those present in the GIT is evaluated. The capacity of the VSP to protect parahormone from degradation caused by extreme pHs or by enzymatic proteolysis (e.g., by trypsin and/or pancreatine) is assayed using the methods described in the Examples above.

[0218] Parathormone alone or mixed with VSP carrier is incubated at different pHs or with different concentration of proteolytic enzymes such as trypsin. The presence of parathormone after the pH and proteolytic enzyme challenges is detected using an anti-parathormone monoclonal antibody.

[0219] Experimental results will show whether the combination of a VSP carrier with parathormone increases the resistance of parathormone to proteolysis and to pH-induced degradation.

[0220] In vivo assays to determine whether oral administration of parathormone in combination with a VSP carrier protects parathormone from the conditions in the GIT and results in increased absorption with respect to parathormone orally administered without a VSP carrier are performed using the methods described in previous Examples. E.g., parathormone serum levels are measured at different times after the oral administration of parathormone (alone or in combination with a VSP carrier) to mice at different doses, and parathromone/VSP ratios. The result will indicate whether absorption of parathormone and parathromone serum levels are increased when parathormone is administered in combination with a VSP carrier as compared to the oral administration of parathormone alone without a VSP carrier.

### Example 9

### In Vitro and In Vivo Protection of Interleukin 2 (IL-2) in Combination with a VSP Carrier

[0221] In preliminary experiments, VSP-IL-2 fusion proteins were produced in which IL-2 was genetically fused to a VSP. One of these recombinant proteins comprised a VSP C-terminally fused to IL-2. In a second recombinant construct, VSP was C-terminally rased to IL-2 via a linker interposed between the C-terminus of the VSP and the N-terminus of IL-2.

[0222] Interleukin-2 (IL-2) is an interleukin, a type of cytokine signaling molecule in the immune system. It is a protein that attracts white blood cells (lymphocytes of leukocyte), the cells that are responsible for immunity. It is part of the body's natural response to microbial infection, and in discriminating between foreign (non-self) and self. IL-2 mediates its effects by binding to IL-2 receptors, which are expressed by lymphocytes. IL-2 has been tested in many clinical trials as an immunotherapy for the treatment of cancers, chronic viral infections and as adjuvants for vaccines. A recombinant form of IL-2 for clinical use is manufactured by Prometheus Laboratories Inc with the brand name Proleukin. It has been approved by the Food and Drag Administration (FDA) for the treatment of cancers (malignant melanoma, renal cell cancer), and is in clinical trials for the treatment of chronic viral infections, and as a booster (adjuvant) for vaccines.

[0223] To assess in vitro the capacity of VSP carriers to protect IL-2 from degradation, the capacity of a VSP carrier (e.g., recombinant VSP1267) to protect human IL-2 from conditions similar to those present in the GIT is evaluated. The capacity of the VSP to protect IL-2 from degradation caused by extreme pHs or by enzymatic proteolysis (e.g., by trypsin and/or pancreatine) is assayed using the methods described in the Examples above.

[0224] IL-2 alone or mixed with VSP carrier is incubated at different pHs or with different concentration of proteolytic enzymes such as trypsin. The presence of IL-2 after the pH and proteolyitc enzyme challenges is detected using an anti-IL-2 monoclonal antibody. Experimental results will show whether the combination of a VSP carrier with IL-2 increases the resistance of IL-2 to proteolysis and to pH-induced degradation.

[0225] In vivo assays to determine whether oral administration of IL-2 in combination with a VSP carrier protects IL-2 from the conditions in the GIT and results in increased absorption with respect to IL-2 orally administered without a VSP carrier are performed using the methods described in previous Examples. E.g., IL-2 serum levels are measured at different times after the oral administration of IL-2 (alone or in combination with a VSP carrier) to mice at different doses, and IL-2/VSP ratios. Biological effects of IL-2 is assessed by monitoring in regulatory T cells numbers/frequencies as well as expression of CD25 on Treg. The result will indicate whether absorption of IL-2 and (i) IL-2 serum levels are increased, (ii) and/or Treg numbers/frequencies is increased, (iii) and/or CD25 molecule expression detected by mean fluorescent intensity of staining using flow cytometry is increased, when IL-2 is administered in combination with a VSP carrier as compared to the oral administration of IL-2 alone without a VSP carrier.

### Example 10

### In vitro and In Vivo Protection of Interleukin 10 (IL-10) in Combination with a VSP Carrier

[0226] Interleukin-10 (IL-10 or IL10), also known as human cytokine synthesis inhibitory factor (CSIF), is an anti-inflammatory cytokine. In humans IL-10 is encoded by the IL10 gene. IL-10 is capable of inhibiting synthesis of pro-inflammatory cytokines such as IFN-γ, IL-2, IL-3, TNFα and GM-CSF made by cells such as macrophages and regulatory T-cells. It also displays a potent ability to suppress the antigen-presentation capacity of antigen presenting cells. However, it is also stimulatory towards certain T cells and mast cells and stimulates B cell maturation and antibody production.

[0227] To assess in vitro the capacity of VSP carriers to protect IL-10 from degradation, the capacity of a VSP carrier (e.g., recombinant VSP1267) to protect human IL-10 from conditions similar to those present in the GIT is evaluated. The capacity of the VSP to protect IL-10 from degradation caused by extreme pHs or by enzymatic proteolysis (e.g., by trypsin and/or pancreatin) is assayed using the methods described in the Examples above.

[0228] IL-10 alone or mixed with VSP carrier is incubated at different pHs or with different concentration of proteolytic enzymes such as trypsin. The presence of IL-10 after the pH and proteolytic enzyme challenges is detected using an anti-IL-10 monoclonal antibody. Experimental results will show whether the combination of a VSP carrier with IL-10 increases the resistance of IL-10 to proteolysis and to pH-induced degradation.

[0229] In vivo assays to determine whether oral administration of IL-10 in combination with a VSP carrier protects IL-10 from the conditions in the GIT and results in increased absorption with respect to IL-10 orally administered without a VSP carrier are performed using the methods described in previous Examples. E.g., IL-10 serum levels are measured at different times after the oral administration of IL-10 (alone or in combination with a VSP carrier) to mice at different doses, and IL-10/VSP ratios. The results will indicate whether absorption of IL-10 and IL-10 serum levels are increased when IL-10 is administered in combination with a VSP carrier as compared to the oral administration of IL-10 alone without a VSP carrier.

### Example 11

### In Vitro and In Vivo Protection of Glucagon in Combination with a VSP Carrier

[0230] Glucagon, a peptide hormone secreted by the pancreas, raises blood glucose levels. Its effect is opposite that of insulin, which lowers blood glucose levels. Glucagon is a 29-amino acid polypeptide. Its primary structure in humans is HSQGTFTSDYSKYLDSRRAQDFVQWLMNT (SEQ ID NO:6). The polypeptide has a molecular weight of 3,485 daltons. Glucagon administration is vital first aid in cases of severe hypoglycemia when the victim is unconscious or for other reasons cannot take glucose orally. Glucagon is given by intramuscular, intravenous or subcutaneous injection, and quickly raises blood glucose levels. The reconstitution process makes using glucagon cumbersome (Meeran et al., Endocrinology 140(1):244-50 (1999); Longuet et al., Cell Metab. 8(5):359-71 (2008)).

[0231] To assess in vitro the capacity of VSP carriers to protect glucagon from degradation, the capacity of a VSP carrier (e.g., recombinant VSP1267) to protect human glucagon from conditions similar to those present in the GIT was evaluated. The capacity of the VSP to protect glucagon from degradation caused by enzymatic proteolysis by trypsin was assayed using the methods described in the Examples above.

[0232] Glucagon (1 μg) alone or mixed with VSP carrier was incubated with different concentrations of trypsin at 37° C. for 1 hour (FIG. 13A). The reaction was stopped by addition of protease inhibitor cocktail (Complete, EDTA-free, Roche Diagnostic). The presence of glucagon after the pH and proteolyitc enzyme challenges was detected using an anti-glucagon monoclonal antibody. Experimental results showed that the combination of a VSP carrier with glucagon increased the resistance of glucagon to trypsin-induced proteolysis. The top panel of FIG. 13A is a dot blot analysis showing that trypsin proteolyzed glucagon. The bottom panel of FIG. 13A shows that combining a VSP carrier with glucagon at a 1:3 glucagon to VSP ratio protected glucagon from trypsin degradation up to 1:2 (protein:protease) ratio. The Dot blots corresponded to pairs of samples in which glucagon samples without a VSP carrier, or with a VSP carrier at a 1:3 glucagon to VSP carrier ratio were subjected to the same trypsin concentrations.

[0233] The glucagon used in these assays was a polypeptide hormone of recombinant DNA origin (r-Glucagon, Lilly) marketed by Eli Lilly Company of Mexico S.A. de C.V. Predictive computer analysis (web.expasy.org/cgi-bin/peptide_cutter/peptidecutter.pl) had indicated that this peptide was sensitive to the action of the enzyme trypsin, as shown in FIG. 13A. Preliminary tests on the sensitivity of anti-glucagon antibody (Sigma-Aldrich Cat.# G2654) used in the experimental procedures described herein determined that 1 μg of this peptide was detected by the antibody.

[0234] FIG. 13B shows that VSP promotes the biological action of glucagon when glucagon is co-administered orally. Effect of oral administration of glucagon was evaluated in BALC/c mice of 7 weeks of age, which were left without food intake for 2 hs and then received the indicated doses of glucagon alone or combined with VSP. The blood glucose levels were determined at the indicated times. The combination of 50 μg glucagon with VSPs (150 μg) appears to increase the biological action of glucagon when it is administrated orally, respect to the oral administration of glucagon alone. Moreover, from the in vivo test is remarkable to note that the animals that have received an oral administration of glucagon plus VSP their glucose levels increased more quickly (15 minutes) respect to the animals with subcutaneous (S.C) inoculation (30 minutes), and the effect of the group glucagon-VSP oral was maintained greater amount of time respect to the s.c. group.

[0235] In vivo assays to determine whether oral administration of glucagon in combination with a VSP carrier protects glucagon from the conditions in the GIT and results in increased absorption with respect to glucagon orally administered without a VSP carrier were performed using the methods described in previous Examples. Glucagon serum levels were measured at different times after the oral administration of glucagon (alone or in combination with a VSP carrier) to mice at different doses, and glucagon/VSP ratios (FIG. 13B). In particular, the effect of oral administration of glucagon was evaluated in BALC/c mice of 7 weeks of age, which were left without food intake for 2 hours and then received the indicated doses of glucagon alone or combined with VSP. The blood glucose levels were determined at the indicated times. The combination of 50 μg glucagon with VSPs (150 μg) appeared to increase the biological action of glucagon when it was administrated orally, respect to the oral administration of glucagon alone. Moreover, from the in vivo test is was remarkable to observe that the animals that have received an oral administration of glucagon plus VSP saw their glucose levels increase more quickly (15 minutes) with respect to the animals that underwent subcutaneous (S.C) inoculation (30 minutes). The effect observed on the group receiving glucagon-VSP orally was maintained for greater amount of time with respect to the group receiving the composition subcutaneously.

### Example 12

### Delivery of Poorly Soluble Small Molecule Drugs in Combination with VSP Carriers

[0236] To assess in vitro the capacity of VSP carriers to effectively deliver poorly soluble therapeutic agents (e.g., poorly soluble small molecule drugs such as glipizide, a poorly water-soluble BCS class II antidiabetic drug; amikacin, an aminoglycoside antibiotic; or vancomycin, a glycopeptide antibiotic), the capacity of a VSP carrier (e.g., recombinant VSP1267) to protect the poorly soluble therapeutic agent from conditions similar to those present in the GIT is first evaluated. The capacity of the VSP to protect the poorly soluble therapeutic agent from degradation caused by extreme pHs is assayed using methods known in the art. For example, the therapeutic agent in combination with a VSP carrier is subjected the pH levels similar to those present in the GIT, and the degradation of the drug is monitored using mass spectrometry or chromatographic methods such as HPLC. Additionally, the capacity of the VSP to solubilize the therapeutic can be measured by methods known in the art. Experimental results will show whether the combination of a VSP carrier with the poorly soluble therapeutic agent increases the therapeutic agent's solubility while protecting it from degradation by conditions similar to those present in the GIT.

[0237] In vivo assays to determine whether oral administration of the poorly soluble therapeutic agent in combination with a VSP carrier effectively keeps the therapeutic agent in solution, protects the therapeutic agent from the conditions in the GIT, and results in increased absorption with respect to the therapeutic agent administered without a VSP carrier are performed using the methods described in previous Examples and methods known in the art. The results will indicate whether combining the therapeutic agent with a VSP can maintain the therapeutic agent in solution, protect in from the conditions in the GIT, and increase the absorption of the therapeutic agent and its serum levels when compared to the oral administration of poorly soluble therapeutic agent alone without a VSP carrier.

[0238] The present invention has been described above with the aid of functional building blocks illustrating the implementation of specified functions and relationships thereof. The boundaries of these functional building blocks have been arbitrarily defined herein for the convenience of the description. Alternate boundaries can be defined so long as the specified functions and relationships thereof are appropriately performed.

[0239] The foregoing description of the specific embodiments will so fully reveal the general nature of the invention that others can, by applying knowledge within the skill of the art, readily modify and/or adapt for various applications such specific embodiments, without undue experimentation, without departing from the general concept of the present invention. Therefore, such adaptations and modifications are intended to be within the meaning and range of equivalents of the disclosed embodiments, based on the teaching and guidance presented herein. It is to be understood that the phraseology or terminology herein is for the purpose of description and not of limitation, such that the terminology or phraseology of the present specification is to be interpreted by the skilled artisan in light of the teachings and guidance.

[0240] The breadth and scope of the present invention should not be limited by any of the above-described exemplary embodiments, but should be defined only in accordance with the following claims and their equivalents.

1. A therapeutic composition comprising a VSP carrier and a therapeutic agent.

2. The composition of claim 1, formulated for oral administration.

3. The composition of claim 1, formulated for mucosal administration.

4. The composition of claim 1, wherein the VSP carrier is selected from the group consisting of a VSP, a VSP-like protein, a VSP or VSP-like protein fragment, a VSP or VSP-like protein derivative, and a combination of two or more of said VSP carriers.

5. The composition of claim 4, wherein the VSP carrier comprises a VSP from Giardia or a fragment thereof.

6. The composition of claim 5, wherein the VSP from Giardia or a fragment thereof comprises a VSP extracellular domain.

7. The composition of claim 5, wherein the VSP from Giardia is VSP1267.

8. The composition of claim 1, wherein the VSP carrier comprises the amino acid sequence of SEQ ID NO:2.

9. The composition of claim 1, wherein the VSP carrier further comprises a heterologous moiety.

10. The composition of claim 9, wherein the heterologous moiety is a protein purification tag sequence.

11. The composition of claim 10, wherein the protein purification tag sequence is a His6 tag.

12. The composition of claim 1, wherein the VSP carrier consists of the sequence of SEQ ID NO:1.

13. The composition of claim 1, wherein the therapeutic agent is a biological agent.

14. The composition of claim 13, wherein the biological agent is a bioactive peptide.

15. The composition of claim 14, wherein the bioactive peptide is selected from the group consisting of insulin, human growth hormone, glucagon, fragments, analogs, derivatives or variants thereof, and a combination of two or more of said bioactive peptides.

16. The method of claim 15, wherein the bioactive peptide is a natural insulin.

17. The method of claim 15, wherein the bioactive peptide is a recombinant insulin.

18. The composition of claim 15, wherein the bioactive peptide is an insulin analog.

19. The composition of claim 18, wherein the insulin analog is a fast-acting insulin.

20. The composition of claim 18, wherein the insulin analog is a long-acting insulin.

21. The composition of claim 19, wherein the fast-acting insulin is insulin aspart.

22. The composition of claim 20, wherein the long-acting insulin is insulin glargine.

23. The composition of claim 1, wherein the molecule to molecule ratio of VSP carrier to the therapeutic agent ranges from about 10:1 to about 1:10.

24. The composition of claim 23, wherein the molecule to molecule ratio of VSP carrier to the therapeutic agent ranges from about 3:1 to about 1:3.

25. The composition of claim 24, wherein the molecule to molecule ratio of VSP carrier to the therapeutic agent is 3:1.

26. The composition of claim 24, wherein the molecule to molecule ratio of VSP carrier to the therapeutic agent is 1:1.

27. The composition of claim 1, further comprising a pharmaceutically acceptable excipient.

28. A method of delivering a therapeutic agent to a target location in a subject comprising administering the therapeutic composition of claim 1 to a subject in need thereof.

29. A method of treating a disease or condition in a subject comprising administering an effective amount of the therapeutic composition of claim 1 to a subject in need thereof.

30. The method of claim 29, wherein the disease or condition is a hormone deficiency.

31. The method of claim 30, wherein the hormone deficiency is an insulin deficiency.

32. The method of claim 31, wherein the insulin deficiency is type 1 diabetes

33. A method of treating a disease or condition in a subject comprising combining a VSP carrier and a therapeutic agent, wherein the VSP carrier can bind to the therapeutic agent, and administering an effective amount of the combination of VSP carrier and therapeutic agent to the subject.

34. A method of increasing the resistance of a therapeutic agent to enzymatic degradation comprising combining a VSP carrier and a therapeutic agent, wherein the VSP carrier can bind to the therapeutic agent, and wherein combining the VSP carrier and the therapeutic agent results in increased resistance of the therapeutic agent to enzymatic degradation.

35. A method of increasing the resistance of a therapeutic agent to pH denaturation comprising combining a VSP carrier and a therapeutic agent, wherein the VSP carrier can bind to the therapeutic agent, and wherein combining the VSP carrier and the therapeutic agent results in increased resistance of the therapeutic agent to pH denaturation.

36. A method of increasing the attachability of a therapeutic agent to mucosal epithelial cells comprising combining a VSP carrier and a therapeutic agent, wherein the VSP carrier can bind to the therapeutic agent, and wherein combining the VSP carrier and the therapeutic agent results in increased attachability of the therapeutic to mucosal epithelial cells.

37. The method of claim 36, wherein the mucosal epithelial cells are intestinal epithelial cells.

38. The method of claim 36, wherein the mucosal epithelial cells are gastric epithelial cells.

39. The method of claim 36, wherein the mucosal epithelial cells are oral epithelial cells.

40. A method of making an orally deliverable composition, comprising combining a VSP carrier and a therapeutic agent, wherein the VSP carrier can bind to the therapeutic agent.

41. A method of making an injectable composition suitable for oral administration comprising combining a VSP carrier and a therapeutic agent, wherein the VSP carrier can bind to the therapeutic agent.

42. The method of claim 28, wherein the VSP carrier is selected from the group consisting of a VSP, a VSP-like protein, a VSP or VSP-like protein fragment, a VSP or VSP-like protein derivative, and a combination of two or more of said VSP carriers.

43. The method of claim 42, wherein the VSP carrier comprises a VSP from Giardia or a fragment thereof.

44. The method of claim 43, wherein the VSP from Giardia or a fragment thereof comprises a VSP extracellular domain.

45. The method of claim 43, wherein the VSP from Giardia is VSP1267.

46. The method of claim 42, wherein the VSP carrier comprises the amino acid sequence of SEQ ID NO:2.

47. The method of claim 42, wherein the VSP carrier further comprises a heterologous moiety.

48. The method of claim 47, wherein the heterologous moiety is a protein purification tag sequence.

49. The method of claim 48, wherein the protein purification tag sequence is a His6 tag.

50. The method of claim 42, wherein the VSP carrier consists of the sequence of SEQ ID NO:1.

51. The method of claim 28, wherein the therapeutic agent is a biological agent.

52. The method of claim 51, wherein the biological agent is a bioactive peptide.

53. The method of claim 52, wherein the bioactive peptide is selected from the group consisting of insulin, human growth hormone, glucagon, fragments, analogs, derivatives or variants thereof, and a combination of two or more of said bioactive peptides

54. The method of claim 53, wherein the bioactive peptide is a natural insulin.

55. The method of claim 53, wherein the bioactive peptide is a recombinant insulin.

56. The method of claim 53, wherein the bioactive peptide is an insulin analog.

57. The method of claim 56, wherein the insulin analog is a fast-acting insulin.

58. The method of claim 56, wherein the insulin analog is a long-acting insulin.

59. The method of claim 57, wherein the fast-acting insulin is insulin aspart.

60. The method of claim 58, wherein the long-acting insulin is insulin glargine.

The application's sequence listing, which the Patent Office published only in electronic form, follows.

SEQUENCE LISTING (588 sequences)

SEQ ID NO: 1 - protein, 572 aa, Giardia intestinalis
MLLIAFYLILSTFAVDCKNSGNSCEAGQCDTIGDTEICMQCNQGKVPINGICTAHSEEAVTNAGCKKNGGTNIEESDKVCGQCGNGYFLHKGGCYKIGEAPGNLICADEASNPGARTAGVCGACKDGYYKNSDAVATADSCIACEDANCATCGGAGENKCTKCIDGYFVGATGNEGGCIKCDATTGPNSYKGVAGCAKCEKPKNAGPAKCIECAADYLKTEADEQTSCVSEAVCREGKTHFPTTDSAGGNKKVCVSCGTTNNGGIENCGECTSKESAARAGTEITCTKCSSNNLSPLGDACLTDCPAGTYAVSGDSGSVCKPCHNTCAGCQTDDRETSCTACSPGYSLLYESNGATGRCVKECTGAFITNCADGQCTANVGGAKYCTQCKDGYAPIDGICTAVAAAGRDVSVCTATGGKCTACTGNYALLSGGCYNTQTLPGKSVCKAVANSNDGKCKTCANGQAPDPATNFCPLCDSTCAECSTKNDADACTKCFPGYYKTGNKCIKCTESSNNGKKIDGIPDCLSCEAPINTGPAICYVKTDGTSDDNSGNGGDSTNKSGLSTGHHHHHH

SEQ ID NO: 2 - protein, 565 aa, Giardia intestinalis
MLLIAFYLILSTFAVDCKNSGNSCEAGQCDTIGDTEICMQCNQGKVPINGICTAHSEEAVTNAGCKKNGGTNIEESDKVCGQCGNGYFLHKGGCYKIGEAPGNLICADEASNPGARTAGVCGACKDGYYKNSDAVATADSCIACEDANCATCGGAGENKCTKCIDGYFVGATGNEGGCIKCDATTGPNSYKGVAGCAKCEKPKNAGPAKCIECAADYLKTEADEQTSCVSEAVCREGKTHFPTTDSAGGNKKVCVSCGTTNNGGIENCGECTSKESAARAGTEITCTKCSSNNLSPLGDACLTDCPAGTYAVSGDSGSVCKPCHNTCAGCQTDDRETSCTACSPGYSLLYESNGATGRCVKECTGAFITNCADGQCTANVGGAKYCTQCKDGYAPIDGICTAVAAAGRDVSVCTATGGKCTACTGNYALLSGGCYNTQTLPGKSVCKAVANSNDGKCKTCANGQAPDPATNFCPLCDSTCAECSTKNDADACTKCFPGYYKTGNKCIKCTESSNNGKKIDGIPDCLSCEAPINTGPAICYVKTDGTSDDNSGNGGDSTNKSGLST

SEQ ID NO: 3 - protein, 637 aa, Giardia intestinalis
MFGSFVLAGVLVQIAWAGKATERAAQCADNTNCAEEACNVLIGGKLYCSRCNTGFVPINGQCADKEGATDQCKDGSGGDTADQTCGQCAEQTFMYKGGCYEAAQQPGQTMCQAADAGVCTQAAQGYFVPPGADASHQSVIPCGDEEGITVKNDKKYKGVLHCTRCYAPTEAADANAKAATCTACGDSKIVKTAKDSATSCVTEEECTGTKTCKTCAEGTSDGCATCEKGADGAVACKTCGSNKKVQPNKKGCIAKCPETVSAEKDGVCECVEGYVPDNAGTGCTKKPDPQCNTPGCKTCSEPKTSKEVCTECEDPKALTPTGQCIYGCEHLEGYYEGTSEGGKKACKKCEVENCLLCNGQGQCETCKDGYYKSGAACAKCNTSCKTCANGNSNGCTSCEPKQVLSYEGEGTGTCKPGCKPVSGGKDGTCKSCDLNIDGTSYCSACNVGTEYPENGVCVKKSARTASCQAEPSNGVCGTCARGFFRMNGGCYETTKLPGKSVCEEVASAGDTCQTPADGYKLNNGALITCSAGCKTCTSQDQCDTCKAGYAKTGGNTKKCVPCATGCSECNADDATKCTVCAAGYYLSKEKCIACDKSDGGSITGVANCANCAPPTNNKGPVLCYLIQNTNRSGLSTG

SEQ ID NO: 4 - DNA, 1698 bp, Giardia intestinalis
atgttgttgatagccttctatcttatattatctacatttgcagtagattgcaagaatagtggaaatagttgtgaagctggccaatgtgatacgattggcgatactgaaatctgtatgcaatgtaatcaagggaaagtacccatcaatggaatatgtacagcccatagtgaagaagcagtcactaacgctggttgtaagaagaacgggggtactaatatagaagaaagtgataaggtatgtggacaatgtggaaatggctacttcctgcacaaaggcggatgctataagataggagaggctcctggcaatctcatctgtgcggatgaggcgtcaaatcctggtgcacgtactgcaggggtgtgtggtgcttgcaaggatggctattataagaattcggatgctgttgcaactgcagactcctgtatagcatgtgaagatgccaactgtgccacatgtggaggagctggtgaaaacaaatgtacaaaatgtatagacggatactttgttggagcaactggaaatgaaggtgggtgcataaaatgtgacgctaccacagggcctaatagctacaaaggagttgctggatgtgctaaatgtgaaaagccaaagaacgctggtcctgcaaagtgcattgaatgtgctgctgattatttgaaaacagaagcagatgaacaaacgtcttgcgttagcgaagccgtgtgcagagaaggcaagacgcacttccccactactgacagcgctggtggtaacaagaaggtatgcgtaagttgtggcacaacgaataatggcggcatagaaaactgtggagaatgcacctctaaggaaagcgctgcacgggcagggacagagatcacctgcaccaaatgctctagcaataatctgagccccctgggagacgcgtgtctaacagactgccctgccggaacgtatgccgttagtggcgacagcggcagtgtctgcaagccctgtcacaacacgtgcgccggctgccagaccgacgacagggagacttcctgcacggcctgctcccctggatactcccttctgtatgagtccaacggagcaactgggaggtgcgtcaaggagtgcactggtgcgttcattaccaactgtgcggacgggcagtgcacggctaacgtcgggggtgcgaagtactgcacccagtgcaaggacgggtacgccccgatcgacgggatctgtacagcggtggcagctgccgggagagacgtgagcgtgtgcacggccacaggtggcaagtgcacggcatgtacaggcaactatgcgttattatcaggtggatgttataacacacaaacacttcctggaaagtcagtatgtaaagccgtggctaatagcaatgacgggaaatgcaaaacatgtgccaatggtcaagcaccagatcctgctactaatttctgcccattgtgtgattcaacttgtgcagaatgttcaactaaaaatgatgctgatgcttgtacaaaatgttttccaggatactataaaacaggaaataagtgtatcaaatgtacagaaagtagtaataacggaaaaaagatcgatggaatacctgattgtttaagttgtgaagcaccgattaatactggtcctgccatctgctacgttaaaacggatggcactagcgatgataacagcggcaatggtggagacagcaccaacaagagcggcctttccactggc

SEQ ID NO: 5 - DNA, 1908 bp, Giardia intestinalis
atgtttggcagttttgttctcgcgggggtactcgtccagattgcatgggcaggaaaagcaacagagcgcgcggctcaatgcgcagataacactaattgcgcagaggaagcatgcaacgttctgatcggtggtaaattgtattgctctcgatgtaacacaggatttgttcctatcaatggacaatgtgcagacaaagaaggtgcaacagatcagtgcaaagatggctccggaggcgatacagctgatcagacctgtggacagtgcgccgagcagactttcatgtacaagggcggctgttacgaagcagcccagcagcccggacagaccatgtgtcaggcggcagatgctggagtatgcacacaagccgcgcaaggatacttcgtgccgccgggcgcagacgcctctcaccaatcggtcataccatgcggagacgaagagggaataacagttaagaacgataaaaagtacaagggcgtgctgcactgcactcggtgttacgctcccacagaagcagcagatgctaacgccaaggccgccacgtgtactgcgtgcggcgatagcaagatcgtcaagacagccaaggactcagccacctcctgcgtgacagaagaagagtgcaccggcaccaagacgtgcaagacgtgcgccgaggggacctccgacgggtgtgcgacgtgcgagaagggcgccgatggagcagtcgcctgcaagacgtgcgggtctaataagaaggtccagccaaacaagaaggggtgcatagcaaagtgcccggagacggtgagtgccgagaaggatggcgtttgtgagtgcgtcgagggctacgttcccgacaacgcgggcaccgggtgcacgaagaagcccgacccccagtgcaacacccccggctgcaagacgtgcagtgagccgaagacaagcaaggaggtgtgcacagagtgcgaagaccccaaggccctcacgcccacgggccagtgcatctacggttgtgagcacctggaaggctactacgagggcaccagcgaggggggcaagaaggcctgcaagaagtgcgaggtcgagaactgcctcctgtgcaacgggcaaggacagtgcgagacctgcaaggacgggtactacaagagcggagccgcctgtgccaagtgcaatacctcgtgcaagacgtgcgcgaacgggaactccaacgggtgcacgagctgcgagcctaagcaggtcctcagctacgaaggagagggcacggggacgtgcaagccaggctgcaagccagtgagcggcggcaaggatggaacgtgcaagagctgcgacctgaacatagacgggacaagctactgttctgcctgtaacgtgggcacggagtatccagagaacggcgtgtgcgtcaagaagtcggcccgcacagcctcctgccaggcagaaccgagcaatggtgtgtgcgggacatgtgcaaggggcttcttccgcatgaacgggggctgctacgaaacgaccaaactccctggaaagagcgtctgtgaggaggtagcatcggccggcgatacctgtcagactccggccgacggatacaagctgaataatggcgcgctcatcacttgctcggccggatgtaagacgtgcaccagccaggaccagtgcgacacgtgtaaggctggatatgctaagactggcggtaacactaagaagtgcgttccctgcgccactgggtgctccgagtgcaatgcggacgacgccaccaagtgcacggtgtgcgctgcagggtactacctgtccaaagaaaagtgcatagcatgcgacaagagcgacggcggatccatcaccggcgtcgccaactgcgccaactgcgctcccccaaccaacaataaagggcctgtcctctgctacctcatacagaacaccaacaggagcgggctttccacg

SEQ ID NO: 6 - protein, 29 aa, Homo sapiens
HSQGTFTSDYSKYLDSRRAQDFVQWLMNT

SEQ ID NO: 7 - protein, 1456 aa, Paramecium tetraurelia
MSNFLFTINLIFMNCLLTWSCDPGQFDDSGQCKNCISNCLSCSNDYSCGTCKTAYYVVPIINLCDSCQNGCQVCSLVSCATCPPTFKKKSCSLCYPGYYLSGGNCSTCPIQCKTCTSNTVCQTCADHNLLIGTFCSVCDASCKNCETTTTTCTSCDPGKYLSGSSCLTCSSPCSECIDASTSCTACIDSKKTAVNYQCVCADGYYTDGSNQCQSCTAPCSKCEYNATNCTDCVSTFTLSTTTLYQCDCSPGYFYVDPQTCQACVSPCETCQLNQNHCLSCIDPNSTVNNSNQCVCNSGWLLDADGETCTKCVLPCVECEDTINKCVTCQDQAHQSPDTCVCEPGWIFDTNYYCIQCQQPCKTCEISTSQCLACFDINQEVNTSKQCVCKSTYYADSPITCAKCQQPCYECDTNGCINCIDVNQILDINKQCICKPGYVQSGYVCLQCLNPCATCINAINQCLTCVDPNQIVQNFKCLCKEGFVKKGNYCCDEYCSDCQGVDSCNSCIKGYFLTNINRCLKCIDYCDICYDQSVCQTCQEGYFINQQFQCEACVSSCKICGDPQICDVCFDGYYLLDQKCEACNQNCLTCNEVSEKCLTCRPNYEINSKDQCICKFGYYEEQNQCYKCEYPCKKCLSKSICSECFQLSNLHLDENAQCKCSPGYFWKENNCSQCHQSCLTCIDDKFNCLTCDQKLHRTLKNHKCLCAQDYFESEDALCISCLTDQGKSQEICKYSDCNDKIWTYGEQCDDGNDVIRDGCSNCKIDHNYSCSNEILKQSICFQCSTHCIQCQLDPLTKKSKCNKCEVGYFLDKNDCVECSINCLECLDQAYNCVSCRFPQQKNHKCQLCESGYLADEENGTCLNICGDQIKVKEEECDDGNKIKGDGCDNYCKLESKYIFVNGVSIVPNYPKPLLQSVGSSQVYSVTRLFKLYYITPIVIKEGFQIKDYLTFHISNSLGVQQMDQSIQLTQDTSQINEFNQSEFSLMINITFSRGSQDENLLVKFLNKSVIYSNEGYSQIETEVSCLIPKIIFIDDAAIAQVQMATKSNSYVLYFIGAMCGGSVIFGGVEVFFNLLDTLQMLSYLKYLNTQLPYNLQTYFELFGFAQFNFIQKIFDFSGFIDEILDTQQMKKIPTKVASDEVTSLFIINSATIATVWLSLFGIYAIAKVIPKILYSIKFKFYSESQTENTRLVQIGVYFLTVKFVINRLCFMIIQEFFYSGILRAHMATAYDFTFSVVLQLYALELNSSNLFVRFSSLLACVASSIYIYTIYFVIKISQMKNYALNNQEVQAKYGSIFDGIKKNQFSKYLNAILLIKKLIFMLLLIFAYDFPTFQTISIMLLSISMSLFYIFFNPIEDKLEYFKQLFSEVSISCTLLNITILTCEYELDYFTYEIRQYFGWSCIFCMTAILFIQLGIDGFQQWRYIFQKYKQIRKIAQLILGVFQGNRQVPASSNIFQ

SEQ ID NO: 8 - protein, 4719 aa, Paramecium tetraurelia
MNLKKSLFLCVLLTIVVKGDTAINQPSNTDQGLNSNNPQFACTKGNGCFAQQGLTLMDRSVCHASRQLEGIVLAQVQIHAIMQHVRMDIIKSDQLVLNTLIPTVQEEVFQQTAQPQCVSNAMGNRLKQVEYVFKITIVKPLVQALVSALFVPMDITMYSQPTLQMNSMEHKLLLTTPPISKALTLVCLAISIVQPANRSIISCSSLFSTYCNSCVKGYYLNNNQCLRCQDKLTKCNACPDETKCTECAVGSYLSNGSCILCTTLDQNCSACSDSSTCTSCVSAAYYTSGQQCIQCSDTISYCKQCSSGQNCTKCTTGFYLKSGACFLCSTQMVSCMTCSDGNTCTSCSDGTFLDGTKCSKCTLAVSNCEYCLNGTTCTTCKPKYYLNKNACNACSNSCENCINSSTNCTSCSSGYFLNGATNTCDLCDANCLTCLSAAKTCTSCVPGYFKDGDKCTECSNKCFTCVESATKCTACYVGRYFNNNNCLPCSNTCTDCETSATECTACSKGSYLNSNTCSVCSITCQECKDSATNCTKCYDGKYLNTNQCITCEFPCVNCLSKTECQSCVPGYYLSNTDCVKCAYPCSTCGTDGKCTDCVAGYEYDGSNCQICLKPCTTCQSSQNGCQSCVVGYYQHDNTCSQCSNECAGCITSATNCTSCYAGTYLNSNTCAQCTSPCATCKDSATSCRSCVQGFFYTGDPNYTCTACSKSCVACTVDANTCSSCQSGYFKSGGADGPCNACTSPCSTCSTQANSCDSCVDGYYQSSTTTCDLCKAPCAKCVNNQDKCTGCVYGYYYSENNNSCTQCTLPCTNCVASLTDCQACVQGYYLSAPGTCTECPVNCTACDSATSCTGCVDGYYVNGSKVCTLCAAQCAKCSDANNCTGCDIGFFLDKTNPNAVTCTKCTNPCYGCVDNATKCTVCDSGLVLDDVNHTCNQCSPECTSCSQSDPKNCQSCSPGYYYNNNNQCLQCSNLCKTCSQNDKNYCTACYDGFYQPTGQNTCKVCIEPCKTCKNSTSGDQCLSCYSGDFWDDTNFLCKQCQYPCVSCTNLTTCKTCEKGYFLTDPNTPGTCNICDANCDACEKTSTKCTACPNGYYVSSTNICIIYTKCTGTECVSGYYMDSNSNCVQCASICLTCNASGNNACLSCPSGSYLNAATCTKCPNNCTGCTYNSATSSVECSSCVTGYYVNNKQCTICANQCLECETTANNCTNCDTGFWKNTSLASDQCQPCLYICKTCDTAANSCQNCIDGYYPNNNACSVCPLSCTKCTAADNCTDCASGYYKNQVDATHYNCLQCVSPMVTCESASTCTTCMTGYVCNSGSCDQCSYACSTCSGNPTTCESCVPGFVKMADNTCKACTFPCLTCTGEDQTKCDSCPPGYYPNNNSCSQCPKACLTCSDQNTCTSCIDGFYKNGAACTQCQLPCLQCTTQTACKTSCIDGYFLSGTTCSACPNNCLKCSSTDPGNCSSCITGYHLDSGDCKSCSLVSPSCLECPDSKTECSKCLGGYYPDNNTCEKCTSNCLLCTKASCTTCLPGYYPNGTTTCQQCTKPCNVCNSATECTDCGDGFFLNASKECQECSAVGCLKCPSDTCDTCSTQLINDNTCSQCQLPCATCKSTGPTKCQTCVTGFYITTDTCNVFVFPCNSYSSDGNGTCQDCFAGYYLDNSNACQPCNANCKVCSNQSASHCTSCQDGYFPSSNQCQPCSASCTTCVTSDTNCQVCATGYYPSATLPATCNKCPDKCTTCTDSNTCQGCRPGFIKNGSSCDQCTSHCLTCDPDVSTCDSCIPGFYQTSSTCTQCKVGCLACDDDTTCTACWSSYYKSGSNCKNDCSGDCATCTYSNEVQTCLTCTAANKYPDPANPGQCKACVPGDDCSRNCVENCTTDQPECENNGGYYNAGPACTKCTAPCKNCTGNGTTCTSCVDGSYGADCSSTCNSSCKACTDTGVDKCSSCYDGFYLADPSPNSCNRCTNNCLTCSNSTTCLTCIPGYYPDLPNCTQCQYPCLTCTGVSTCQTCASGFHVNGSNACVSCDVGCDICSSSVCSKCSKGYYGDGNPSCTKCTFPCLECTSSTACTKCFQGYNLNGNDCEQVSTGCQVWTTDGTTSTCQTCYDGFYPNNKACSKCPNFCTTCTSNTSCGPCLTGSYKNGTNTCTQCVKGCTTCDSATVCTDCIDGFYKQANDVCQECPQKCVKCSDSSTCSECLVGYYLNGNACTECASPCKQCALDGTVKCSACDSGYQIQNDACKQCPDFCQTCDVSFKCTLCIDGYFQDSGDGSCKQCITACNKCSALDTCDTCQVGYYYNSGAKQCSQCQRGCNVCDSTQCTSCVNGYYAVANQQCQQCPSPCRTCNDTTGSCKDCVDGYYFNSPNCTECQSPCIKCSGAGNNCQACEDGYYLNGGSCTECPTQSVCQKCAVDAGDSTLKCTACAAGFFIDSANSYVCRPCDTACTACTTGAKVCQSCIQGYYPANDKCQQCSLACKICSDANTCTDCSNGYYLTGQSCNQCSLNCKYCNSSTSCKTCVDGAFIENDQVTCTLCSGKCATCINSSTNCLSCIPGYYGTPTCSSQCSNSCLYCQNSTTCSKCLPGYYLDNSNACQPCDNTCTTCSNNSATYCLSCTTGYFFNNNSCEQCQSPCTACAVSADACSGCQPGFALINSKCEQCDAICKTCSTSKSNCDSCYDGYYKNNGTCNQCAEPCTKCTYTDPGPAQCSACPDGYFLSNNVCAECKEPCKKCETAGDQCINCLDGFYKDPNNPKCPVCNSPCVTCNTDGDTCDSCIPGYYYDTTQNPAKCVQCTTPCLTCSYSATAGAVVCNTCISGYFYDTSQTPAVCTPCQTPCASCENSATECRSCNDSAFHLTTTPPLTCTQCTDPCKTCNAVTTECTDCLDGYFLPSGQTTCSECASPCLTCSPDANTCQSCIDGYYRNGNACNICQKPCNKCVDSQTKCTSCITGYYLNVNTCIQCTSPCADCTDTACLGCIKGYFWDGTKCIQCSTACTACKTSATTCSSCAPGYFLNGTGDGCNPCQTPCKECVTSATQCTSCFTGLYKNGSGAGATCTYCPSPCIICDDQNTCTTCAVGYSLKTSDHQCYQCQTPCLTCLTSASECDKCVDGYYKDGVNCTICANPCATCNGAGTNSCLSCDDGFYLNGSTCTTCVLPCLTCSSSALCKSCGDGYFLDGSQACTVCSNNCVTCVDSAGKCKSCIAGYYLDGNNTCQQCNNPCKTCENTAGNCKSCPSAYFQDGTTCTACQYPCFNCNNPANSCSSCVDGYYISGTNCNQCPDPCAKCTDQNTCTGCLAGYYYDGSQCQQCLYPCTICSSQSVCTGCDSGQYVNNNTCAKCNSNCLTCAVTDVTCVTCLTNMYLKADNTCDKCTLPCATCDTSATKCNSCITGYYLSGSTCQLCFSSIINCATCDNGSTCKTCTPGFYLSGNLCLPCSTSVDACRTCQINQSTYSCTACTVGLFLDVSTCSKCQDTNCLTCSTTSSACTQCLTGYFLDNGACTQCKSNCTSCTSSSTCTSCLVGYQLSNDSCNKCNDTKCTSCVNSVSECSLCIIGYYLTASGCSACPSGCAACTNSSTCSSCLTGYYLSNNQCNQCSSDINGCLSCLSNTKCTACDLTYYLKNQSCTTCVAGCNVCTNDTQCIVCTTKWYLDSNKTCTKCPSECATCSSGSVCLTCEANYKLQNSNCIKCTGYSNQCSECANDLCSNCVSGYTLLANNTCASCPQNCATGCTKNTQQGSSYSTICAVCQDTFYLNENSQCNSCNTGGNFALRCTYDSKTKVITPTQCINNYFLVNNQCYQAQTSNTCSKLFQPNDGTQINSQLCSDCWPSYLQSNQICYKCANCADNSCSLDQNNKPVCSSCANYYYSDSSATCQLCIANCIKCTGTGIDNCSQCDTGYYKSSNSCVACTTDSSSKSTCLSCSNETTCSTCINGYYESNGSCLACQFGCSQCVSPGNVCSGCISGYFLQNGGCVKDQGNCLENQQNQNNGCYVCAYGFYPINGWLSQQGQSQIIDNSCVQCVYPQAAFVCRSNPSDNQVQSANFGSVASGKNSNYFKSAAPLSTTRQTTPQCKSGSFWTGQSCMPCPTVNNGICQTCNNFTSCTQIQCNPLYYLITIKNVQQCVPIPTGCTDMQYSDKLMSLACSKCSSGYTLIGNICIAINGCLTIDQNSGACTQCTNGYYFNWDFILQTSKSTLTTNTNYYQYFNPFCSKCNTGCATCPSLYTCTQCLPGYFWYQSTLTTNSYSFKIYANSQTNASGQCVACPKNCQTCSSATVCTTCNTNFTVDPNSTNGDCICSSPYTYNQSNQSCSTSTANSICSFGGCAQCNSDNTQCQVCSPQYALTSQTTCTQCLNCNLCTTQPGNSNPTCTECADGYYKVQAYDGAPITCSLCSSSLNNALRCQGVLENQTQLTIIQCADNYFLFGNACYQASNSNCFTIANSNSQNCQQCLPGYTLYGNNCDQCNTKIINCSTCIQNSDQSGLTCQQCINGYVLNTNTNSCQQCPSGCQNCTIIGSTAPYTMQCSTCANGNYIDINGNCQGCPYDCKTCDSKYTCSTCNDGFYLVQSSITFNSKSYAFKPCYPCQNNCGTCTGPSGNICLTCSAGFVLQNGGCVDLTQKIQNDSNTYSLANCYTSDSTGCTVCQAGFFLDQQRVCQECVSPYNNFVCGIKAVSPTNPSNPNDNSNSSNTDTPIPIGDTPIQPTSKYGLMFGILILIVTN

SEQ ID NO: 9 - protein, 630 aa, Paramecium tetraurelia
MFAQARECHIHAKLNIFGQDRRAYLARKDASVVLIWVVMEDYNVKVDGHIKMKETRNVCNAQQDVVHVFQMGQMDLFVISANQDINQQVECGSIFVANICVPLSFNPRLGNVKFFGFGLWGIPYWTIALDNLPQGIEEAYSTLDCIERDSSTTFCSKCPDGSWLNELMQCEKCGPGCSLCKSRGTCVECQSGYYWGEETGQYTQYTAYFNGAGRCLQCSIKNAKSCDANSVLSCVDGSYLQNSNCVDCLMQCQTCTNGNSCVTCKQGYYQQNNECQYCIGNSDMNINCLECSDLNTCTKCADSYMLINSQCYLIPVDPGCETFRAKGTNQVVCDVCLNGYYLYQGTCYSCLNENELYDLCTNLDESGQSPSVYPTQCLTNIADPISSSNYFLIQQTDQEIKTNLCVQNNNGCTKMIDSNGQCSQCADQYTLNNGVCYPCSTILNCLECSYNNEVVCNKCIQSTYLNNNECVQCIEGCNKCSSQNSCDTCSTGYYYNTQQQCVKCSVQNCSSCPNDTCQSCVPQFFLYAQTCQLCPPGCSNCQGTLGRECTTCLDGFYLKDNGCYPGTQYCAQHNSDGTCKHCIYGAYVADNQECLPCISLGAGYVCGQNANVYCFLGILQFAVLFMLLFQ

SEQ ID NO: 10 - protein, 305 aa, Trichomonas vaginalis
MLGIFICLASSALGKRMKLDDKDVIPNCPSISWEESETSFTEENINAGECRSISSYAYAVASESDFDVDLYHFNDLSKPFKTVTNPIFINNPGATHDADAGFLAAIRCHDKEKECKVQLILQYFPSWVSEIDGQNINNELYITSLKSGKIEKDVKVNNAGIGTSFLSRNTYKVVGEPKDKVKIIIIPDYETAANEVEVTGPATTVGGSEEQIKVTITYETTKEGDKLWFPEFAGWIPQRADAFRVEDLTNEASSNTPTPTASSNKLSGGAIAGIVIACVVVVGAIVGVLVWFFVCKGASAVAPEP

SEQ ID NO: 11 - protein, 310 aa, Trichomonas vaginalis
MFCFLSFFTASIRNKRMKLERSRFGNCTYLDQDYLDTVDLYGLTIKAGECYELMFYSYAAAGDSDFEVDLYKLTGTQTPYKTVKNPIYINNPYMVLLEEENEPDAAFWASVRCADKDKECKVQFIPQVYISYLAEEKDYNAEIYLTSAKSGKIEKSAKNSTIVEFFISKNTYKIVSEPKDKVNFYKFDRYAVQDTPIENNEIEFTGFATTYGRPKSEEEMVLTFTYETTKEGDKLLFPEVTGWIPQRADAFTIDDLKNEDSSKDEEPSKKKLSGGAIAGIVIACVVVGAVVGVLVWFFVCKGSSKVAPAP

SEQ ID NO: 12 - protein, 713 aa, Giardia intestinalis
MFGRFLLAIVILQLARTACTQEADDGKCKTCGVTIGQDTWCSECNGANYAPVNGQCVDVNAEGPSKTLCPQHSAGKCTQCGGNSFMYKDGCYSSGEGLPGRSLCLSSDGDGVCTEAAPGYFAPVGAANTEQSVIACGDTTGVTIAAGGNTYKGIADCAECSAPDATAGAEAGKVATCTKCGVSKYLKDNVCVDKAQCNSGSTNKFVAVDDSENGNKCVSCSDNLNGGVANCDTCSYDEQSKKIKCTKCTDNNYLKTTSEGTSCVQKDQCKDGFFPKDDSSAGNKCLPCNDSTDGIANCTTCALVSGRSGAALVTCSACTDGYKPSADKTTCEAVSNCKTPGCKACSNEGKENEVCTDCDGSTYLTPTSQCIDSCAKIGNYYGATEGAKKLCKECTAANCKTCDDQGQCQACNDGFYKNGDACSPCHESCKTCSAGTASDCTECPTGKALRYGDDGTKGTCGEGCTTGTGAGACKTCGLTIDGASYCSECATTTEYPQNGVCAPKASRATPTCNDSPIQNGVCGTCADNYFKMNGGCYETVKYPGKTVCISAPNGGTCQKAADGYKLDSGTLTVCSEGCKECASSTDCTTCLDGYVKSASACTKCDASCETCNGAATTCKACATGYYKTASGEGACTSCESDSNGVTGIKGCLNCAPPPNNKGSVLCYLIKDSGSTNKSGLSTGAIAGISVAVIVVVGGLIGFLCWWFLCRGKA

SEQ ID NO: 13 - protein, 141 aa, Nematostella vectensis
CTSCIPGLVLSEKGGVCESECSKGRYKSGDACKPCHVSCNACRGPAKGDCLRCNPGHVYFKHTCVTECPEGTFVDDSDGADARRCRPCHAACRTCTGLSVDECTSCSKHLFLQKTSCVLQCSAAYEPDSSSMLCKPCEKSC

SEQ ID NO: 14 - protein, 633 aa, Giardia intestinalis
MLLIVFYLVLSALAANCETEGNKSNCDSGRCEMVGIVEVCTQCKTNGHVPIDGVCTPKNEADANCKKDGGSPLDQDAKICGQCAQGYFLHKGGCYAIGGNVGRIICNDPTPTLKGRNSVEGVCSACNSTSGFFKNPANVANKDSCIACDDTTGDSGNVGLEGCATCQHSGSGAATCLTCKDGYYDNNPSQDTVTCASCTDDCKTCIDTGNAKCTSCQTKYLKITDPNGVFGECVDENTCKQPGTHFPITTTDNIKVCALCSDAENKGVVGCAKCTSTPASDSGNAIIVKCIECTTPDTTKPNFAGTGCFACSATDCSNCSADNVCEKCGKGKKLSPLKDSCLDSCPAGTHNKDNVCVPCHTSCAECASDSVGESSCTACYPGFALRKGEDEATGACIPECTGKYAENCEAGQCTAIVGGSKYCSKCKAGYVPVDGVCVSTTARTPTGCTPNDNNDGTCKECTTTYFLQSGGCYNAQTFPGKLLCTAATGNGQCQTCAASGQSPAGGKCPECSEGCAKCTDSNTCNECFSGYYKGAGNKCFKCTDGDKANSDAITGVENCVSCAPPISGNGGSVICYVKTDGTGGGDNDNNTGGSTNKSGLSTGAIAGIAVAAVIVVGGLVGFLCWWFICRGKA

SEQ ID NO: 15 - protein, 451 aa, Giardia intestinalis
MYRSAPRTITPQERCNLSLVITHPVPIEARGNRAISWPPVGVLLSRSSLVQLVKESESDCLSLLVATHQPDERAVAHELRLMLVGFLLVCATVLAKDSGKTACEQKTGVCDGSLTTAGCATCTPAGSSQTCLTCTTSSHKIRPDEKGCISECPADVSTDVDGFCKCKSGYTPSTNGQTCEQKTGVCDGSLTTAGCATCTPAGSSQTCLTCTTSSHKIRPDEKGCISECPADVSTDVDGFCKCKSGYTPSTNGQTCEQKTGVCDGSLTTAGCATCTPAGSSQTCLTCTTSSHKIRPDEKGCISECPADVSTDVDGFCKCKSGYTPSTNGQTCEQKTGVCDGSLTTAGCATCTPAGSSQTCLTCTTSSHKIRPDEKGCISECPADVSTDVDGFCKCKSGYTPSTNGQTCEPSNTNKSGGLSTGAIAGIAVAAIIVVGGLVGFLCWWFLCRGKA

SEQ ID NO: 16 - protein, 584 aa, Giardia intestinalis
MLLTAFCIMASVLAATCTVEASTRDCAESKCEMVGGTEVCTECKYAGNVPINGACKQKGDSAVTTAGCKKANGTGLAEDKVCERCDGAYFLYKGGCYGVDNEPGQKLCTKAAEGACTEAAPGYFVPPNVAGSDQSVIACNYTISVPVLDGRSYMGVAHCTLCDSPKIASDPTPKPAVCTACEDGYFLGAAGDKESKCILCGDTSGSTWKGVDGCLKCTASGKADTPATCTECQEGKYLKGGDPTSCILRNACTGTHFPNDNVENKKKCLPCGENANGGIENCAECSLLSSVSGSATVLIKCSKCGSDKKLSPLKDACLDSCPVGTYDKQSVCTPCHSSCASCTDTTSTTCTACYSGFVLNTTTGASAGTCIQECTGQYAENCADGQCTAIVGGSKYCSKCKAGYVPVDGVCVSTTTRAVTGCTPGDGVCTACTGSYFLQSGGCYQSTVYPGNTLCSSATNGKCTSCTNGQTADKNSGSCPACPDGCSKCTGSASPQQCSGCFPGYYKSGDKCVKCDASANGITGVPNCISCAPPSNGQGSVTCYVNGSGASRADANRSGLSPSAIAGVSVVVIIVVGGLAGFLC

SEQ ID NO: 17 - protein, 247 aa, Giardia intestinalis
MFEKIIFGIAILQLALAAQTTGKNPAVTCAEDKTRNRTYKTQCTQASPSNCQVDHCTRCAAGNPAVCDECEPGYTANPEKTQCTQASPSNCQVDHCTRCAAGNPAVCDECEPGYTANPEKTQCTQASPSNCQVDHCTRCAAGNPAVCDECEPGYTANPEKTQCTQASPSNCQVDHCTRCAAGNPAVCDECEPGYTANPEKTQCISSNTNKSSGLSTGAIAGIAVAAVIVVGGLVGFLCWWFLCRGKA

SEQ ID NO: 18 - protein, 539 aa, Giardia intestinalis
MSSCHQSCTTCDGQDDASCTSCNSTSFLAVQGNDRGYCISCSTEVPVHGYAGIRGCSRCMLPSSTDTAPVCLDCSEYDYMVSINGRSCVASCGIGASSNYYTRQCTCIAGYGLDQGNRAQGCILCKVSSCALCTDNADICNACEIPFGLSLDGRNCLEVGGCPANCVCENNGTDSGATCVLCEKRYFLQPARRICLHSCPIGYAANPITNTCDLCPANCYSCERAIEDQCTSCVDGYFIYRTDSNVLTMGRCVPECAEAAVGPCVECHAILGSARYCSRCSQGFFPLDGRCVSTSGQQISACAQTDKGLCLKCALGYFLHQGGCYSSLYAPGKLVCAAAERIDPAAYGTCRACTCGYHRTSDGGCIKCTMTGCFACPSSPDICTFCSNGYYSTQVSVDSEEVHCSQCAPGCLSCEDSSPSGCNLCAPGYFWTSSVHGCIRCDNSTISGPLKGIKGCKQCLVSSSETSVVCLDNDPDSPFAFPPLSTNRTTLILSITLPLAVLLLAATVITLAIILVKKRKTTKHGLSTNPVTLTTMVST

SEQ ID NO: 19 - protein, 807 aa, Giardia intestinalis
MRPFSLSLISTCLLTVFFSEEVPIYHNGFGYSCKDAVLNCLQDKCLINLTMFLCTECTSGHVPINGKCVSIKDQASTGSVCVKSPTGGWCTKCNGDYFLFYGGCYNLDSPWKKTICHRAENGLCKECGKGVEGYPSLVFTNPNATSLERCIHCGDPIGFGGHSGVYNCQQCSQPRLSGKVEADCETCSDSNMCPFDYRCKPASNIAAFGYCDYCPKAYVWSASACYAIGSITGNSICLSRNTIDVRGQSLCTQCANSSEVPQNGLCRSISGFDDICTKDPKTGKCTSCKNDSNGQYFLFYGGCYLFNNILDQVGSQICQTVQNNVCTACNSSTKEVFTRNSRCWHCGDSANGGIEGCQRCEMKDSGLQCLECRDLYLSLDKRSCLASCPKGQKGIQGSSSSTHSCACDDGSYLKDGKCVGCAVENCAECDESSCKKCKYGYTLSDSQCVATKCKDPNCDTCEDRDVCTKCTDDHSLDPHGLCVKDCLGSAGYYKATVGGVSRCVACTLGNCAVCESESKCKTCRDGFYVEGSGECKPCSSECATCSGPASGDCTACPAKRRLEYSDGTKGSCVPQCVQDSSCAECGLTVGGTSYCSRCVKSTEYPNNGACTSSSSRAAGIACANVAAGRCVACSSNSFSLNGGCYTSTLLPGKTVCTKASDGWCDSTVAGYGITYNGTLLTCPTNCAMCSSGVCSACNSGFYLEKEVCKACSKGCATCPHGEACFDCLAGYYFSESTCKACHKVISKCSLCVVPEGAVKPICLEYDNTSKKSALSSGAISGIAIGVVLVVGGVAAVLVWFFVFRKKN

SEQ ID NO: 20 - protein, 713 aa, Giardia intestinalis
MFGRFLLAIVILQLARTACTQEADDGKCKTCGVTIGQDTWCSECNGANYAPVNGQCVDVNAEGPSKTLCPQHSAGKCTQCGGNSFMYKDGCYSSGEGLPGHSLCLSSDGDGVCTEAAPGYFAPVGAANTEQSVIACGDTTGVTIAAGGNTYKGIADCAECSAPDATAGAEAGKVATCTKCGVSKYLKDNVCVDKAQCNSGSTNKFVAVDDSENGNKCVSCSDNLNGGVANCDTCSYDEQSKKIKCTKCTDNNYLKTTSEGTSCVQKDQCKDGFFPKDDSSAGNKCLPCNDSTDGIANCATCALVSGRSGAALVTCSACTDGYKPSADKTTCEAVSNCKTPGCKACSNEGKENEVCTDCDSSTYLTPTSQCIDSCAKIGNYYGATEGAKKLCKECTAANCKTCDDQGQCQACNDGFYKNGDACSPCHESCKTCSAGTASDCTECPTGKALRYGDDGTKGTCGEGCTTGTGAGACKTCGLTIDGASYCSECATTTEYPQNGVCAPKASRATPTCNDSPIQNGVCGTCADNYFKMNGGCYETVKYPGKTVCISAPNGGTCQKAADGYKLDSGTLTVCSEGCKECASSTDCTTCLDGYVKSASACTKCDASCETCNGAATTCKACATGYYKTASGEGACTSCESDSNGVTGIKGCLNCAPPPNNKGSVLCYLIKDSGSTNKSGLSTGAIAGISVAVIVVVGGLIGFLCWWFLCRGKA

SEQ ID NO: 21 - protein, 1035 aa, Giardia intestinalis
MLLGIVLLCAAVLAKECVPQISGCAECDESTGTKCTRCDPAGNTPFLMETTPDGGEGTCVGDCTQTPGYYGDASDDQNKKCKKCNAACAACSGAEATKCTRCDPAGNTPFLMETTPDGGEGTCVGDCTQTPGYYGDASDDQNKKCKKCNAACAACSGAEATKCTRCDPAGNTPFLMETTPDGGEGTCVGDCTQTPGYYGDASDDQNKKCKKCNAACAACSGAEATKCTRCDPAGNTPFLMETTPDGGEGTCVGDCTQTPGYYGDASDDQNKKCKKCNAACAACSGAEATKCTRCDPAGNTPFLMETTPDGGEGTCVGDCTQTPGYYGDASDDQNKKCKKCNAACAACSGAEATKCTRCDPAGNTPFLMETTPDGGEGTCVGDCTQTPGYYGDASDDQNKKCKKCNAACAACSGAEATKCTRCDPAGNTPFLMETTPDGGEGTCVGDCTQTPGYYGDASDDQNKKCKKCNAACAACSGAEATKCTRCDPAGNTPFLMETTPDGGEGTCVGDCTQTPGYYGDASDDQNKKCKKCNAACAACSGAEATKCTRCDPAGNTPFLMETTPDGGEGTCVGDCTQTPGYYGDASDDQNKKCKKCAEGQKPNTAGNKCFVCPDANCERCDQSDVCARCSTGAPLENGKCPAATPGCHSSCDGCTSDAMTNQADKCTGCKEGRYLKPNPAAGQSGTCLTAEECTSDKTHFTKEKVGDSKGMCLPCSDATHGIADCKKCALKTLSGETESTVVCSECTDKWLTPSGNACLEQCPAGTYPNDNNLCTPCHDTCAECNGNADAASCTACYPGYSLLYGSGTAGTCVKECTGAFGANCADGQCTADVGGAKYCAQCKDGYAPIDGICTAVKTGRDASVCTAAGGKCTKCAGEYTLMSGGCYGVAKLPGKSVCTLANNGKCTMCAANSQAPVQDKCPECSEGCAKCNDSNACTECLPGYYKNKSSACIPCSKDSTPITGVPNCVSCAPPAGGNGGPVLCYLMKGADNTGGSTNKSGLSTGAIAGISVAVIVVVGGLVGFLCWWFLCRGKA

SEQ ID NO: 22 - protein, 2539 aa, Giardia intestinalis
MISLSLRLGLIVAACVTPATRSPQSGDCLIGKCTVLDGQYCAECAIPGEVPINGVCIPLTDPRAVASGCGGSAEAPLSTSARRCEFCRGGSYFLHEGGCYNVLYSPGNRICRTATSGYCTLCVDGFFLDTTSSIHQCKPCHSTCATCTSGTAQSCLSCRSDRFLKTNECKECSAADGGVTACAQCSQNSDEITCTLCKEKYFVKEGKCTACAANCATCTGERPEDCSVCVSKYSYDLTAKSCTQTCDEHDSQATKCKTSMCTALNNRYCSQCASSSDLLIDGKCVSADDKKICTPFDPPNGTCSTCAKGHLLFQGGCYSVAEPLGQEVCAETSEVQERTVCVRCAQSGFVPVSGVCLRYDAQEVAAVGCVTSRGSAVTPTDTTCASCGAKAFLYKGGCYSNETSPGNVICDELDGTGGCKVCSNKYYRSGSTCAPCHQSCETCSSGAADSCLSCKKDVYFEVFSGGRGYCKPCNDPVATITIVGVANCERCSPKPSGTMPICTKCTTGHVLKGNSCVQVCHEGAEGAGQCKTGHCNTISNTYCSECATSTECPVDGICTATLDGHSAQDGACTSCASGYFLYNGGCYRKGVMPGMLICKDEDDSTSTCSKCEDGYMSSGNGCKVCEVSNCRACSGDAASCTSCNSGYFLKDNIKGSKVCEKVCEEGIGPGKCIYGGCTVRDNTFCSRCSEADEVPIDGVCSLPEKRARICLSASSGACLRCAATHLLYYGGCYKITQPVIEICKQDSQIVEKDTAYCKACSDAGEYPVDGSCTAELDGNTCTSSKCTACGSGYFMHRGICMRQESHSDICARVGAGVCEECGKSYFKNPVASTAIDSCIACSDTAGSNGYTGIDHCDTCLPPKAAGPATCTDCADRYILNEQNRCEESCPEVEESSKATGKCLKGYCNVLNGKYCSRCSLESDYLVDGRCTSTNSNVCTPHTQQNGMCASCAMTHILYMGGCYNPAAPPGSKACARHNLIGNTLYCFQCGVVTDLLVDGHCLAPGSTEAAVCTLHRIPTGTCYYCSSDYFLMLGSCVSAERAPGNTVCKDLGVHDGICSTCKDGYYAPPDRSSVSDSCVPCTENSDTLKGIPHCKSCKVSNGLLVCVACEQFYRPMNGGTECVQTCIEAEADPKEHRCRKDKCDVLGTFYCSQCAADAEGPVNGVCASVAAGVCIQYKQANGTCKYCTHGYIKYKGGCYEAGSFEAGDICDAQDVVTSGAGSFCAKCKQKDEVPVDGECKVSDDCTVKGDGICRSCKQGVKSFQITKDGSPATVACFTKCPDGMYESAEFCQLCDKSCKTCQDSAAKCTGCADGFYLAAGKCVACSVLHCLTCNAANTCASCQDGYYASGNSCVACTPGCKKCDSTGCKVCKDRFALRNNICIEECPVGLLSTSCAAGYCNVNGTLACSRCALLNSVIIDGKCKANDDACIRTTPSSGTCAACKDTHLLYYGGCYAKGAAAGTAICDSQHQATLGPYTICKQCKRDGEVPIDGSCVALANTRAIRSQCVAATPSPTSCTRCGPRFFLHAGGCYEIGRSPGTVLCAVAVDSAVAGVCTSCASGYYSTGLLDPTKESCILCNDTGATNGYTGIDGCTECYPSETPKRVICTRCKDKHIPSEDGSRCIQSCNDSRSESGNCKAGSCTAMGSLYCSRCALDDEWPINGACTGRDTDYVCEKGKGVCTGCLRGYMLYMGGCYDPAAIPGSGICRELLTVGGRTYCKQCNLAGAFPINGLCTKDVPDGVSCSSGLCVICPENYFFHEGGCYDITTTPGSGICEVLGTGRDAGTCRRCRPGYRHNKETLTCMSCAVSNCASCEIDVKYCTECIQPYTLTGVGAGAYCTKPCKRVGQDACSWGSCTIMDGSLCSQCASSDYVPIDGVCTLYPGDARSLAGPCVKDATKGRCTACRGSYFLYQGGCYSAGEYPGTGICDERDATVVDGQVVCGSCLIDGEVPLDGTCAEPKEGLICSKGVCSHCGDGMFLFEGACYTKGRAPGTSICGDTTESTSGCAACEAGFSKTNKGCVRCSDPNCGACVDDPNTCTACRAGYYLQSTSCIACHPACKTCDGMGADKCKECAEGYFGTFATPGLGACLACSDTSGKDSWVGVSGCRLCEAPKVAGPALCKDCLPGYKALSTGTEVTCHAVCPMTYYEAADSCIPCAIDNCATCTSTRCTSCVPEHIWNGEECVPKICPPQCLCREQSIACIGCNENAVEVRPTHSSASRCLLCNDAGAGGGWTGVDGCQRCRLADRVGPVVCLACESGRKALTLDGMLLCPRECPTESFWTSGRECIPCALGCLRCTSATTCSACSQGYYSTQSSVSAPSDCRPCDDVTSQNGFTGIPHCAVCAADRARAGVTCHACAEGYGLSGGSCSPCTAAGCARCDGGVCTSCKRGWHLAGDRCLACPSPCAACSSAASCLACADGYFQATLLGGPRDCVPCDQTAPQGLQMAGIHGCGLCQAQAGSGAVLCLRCANGNLPLENYCGGSSVKRRLGPGAITGITLGVAVLVGGAIGLALGLTVCKRGCAGSTGEGLRPLYA

SEQ ID NO: 23 - protein, 551 aa, Giardia intestinalis
MLLVAFYFVLSALAAECSAEGTAKDNCEANHCEMVGGTEICTQCQTGKVPIDGQCAGATDSNTKCKNADGVADADQTCGKCLLETFMYKGGCYVTTKAPGNVMCGDAAAGKCTQVKAGYFLPPGADNAHDSVVSCGDTTGVTLTDNKKYTGVAGCGKCEQPGEAQNGTPKAATCTECQADKYLKTESGTTSCVDEGNCNNGFFPTTDAQSNNKKVCALCSEADKGGIADCKKCSLKATSARAGPMVTCSECTNNNLSPLKDECMLGCPAGTYANNKVCTLCHESCAGCQTDDKETSCTACYPGSVLEHDGDLTTGKCIQECTGRYAENCEAGQCTAVVGGSKYCSRCKTGFVPINGMCVSTTARAATECVAGEGVCTSCTGAYFLESGGCYKTGAFPGNTLCIAAGANGKCANCANGQNADPQTGACPPCPANCSKCSGDSDVKTCTECYSGYYLDTGKECKKCSETSGNIQGVPNCVSCKAPSSPNAPTPVTCYVKTDATNNGDNDNNGGSTNKSGLSTGAIAGISVAVVVVVGGLVGFLCWWFICRGKA

SEQ ID NO: 24 - protein, 853 aa, Giardia intestinalis
MEPLKALDRYWTVLSQCTCGSFDSHWMIRTDCNGATRCTSMTYALRQSQFCSAQSTSFWPCAEIADCRVVSAIDPVSVDSISACGQRASEGSINCINRRGLTDVPRVCSYQSINRAMFGSFVLAGVLAQIAWAGKATERAAHCADNTNCAADACNVLIGGKLYCSRCNTGFVPINGQCADKEGATDKCKDGSGGDTADQTCGQCAEQTFMYKGGCYEAAQQPGQTMCQAADAGVCTQAAQGYFVPPGADASHQSVIPCGDEEEITVKNDKKYKGVLHCTRCNAPTEAADANAKAATCTACGDSKIVKTAKDSATSCVTEEECTGTEGFFVKNGGTKTCEACDPGCKTCKTEAAKCTSCKDDKPYLKKDNGSDTGTCVTEAECKTGNTHYPDDTEPKTCKTCAEGTSDGCATCEKGADGAVACKTCGSNKKVQPNKKGCIAKCPETVSAEKDGVCECVEGYVPDNAGTGCTKKPDPQCNTPGCKTCSEPKTSKEVCTECEDPKALTPTGQCIYGCEHLEGYYEGTSEGGKKACKKCEVENCLLCNGQGQCETCKDGYYKSGAACAKCNTSCKTCANGNSNGCTSCEPKQVLSYEGEGTGTCKPGCKPVSGGKDGTCKSCDLNIDGTSYCSACNVGTEYPENGVCVKKSARTASCQAEPSNGVCGTCARGFFRMNGGCYETTKLPGKSVCEEVASAGDTCQTPADGYKLNNGALITCSAGCKTCTSQDQCDTCKAGYAKDSGNTKKCVPCATGCSECNADDATKCTVCAAGYYLSKEKCIACDKSDGGSITGVANCASCTPPTNNKGSVLCYLIQNTNKSGLSAGAIAGISVAVIVVVAGLVGFLCWWFICRGKA

SEQ ID NO: 25 - protein, 239 aa, Giardia intestinalis
MLLVPLYFILGVLTATCTGRAQNNCANNKCEMLGATEICTQCNAGYVPIGGVCTAHNDQAVVAGTGAGCQKTGDTAVDGGSTVCEKCTEANYFLFMGGCYKTGEAPGNLICTAAASGKCSACVENGNVFKNKNSSPTLGTECILCSDDTGSNNNKGVANCATCTAPSADSGTATCKTCLPEFALDGSANACISNSGTGGNVNKSGLSTGAIAGIAVAVVIVVGGLVGFLCWWFLCRGKA

SEQ ID NO: 26 - protein, 201 aa, Giardia intestinalis
MCKTAEGGRCTAPSENGRYFLVPGASSTDQSVLACENPLGTVIGAGSTAKAYVGVYGCTACTAPAALEAPGMAPATCTACSGNNKPNLAGSGCFACTVDGCSHCGAGGKCEACTSKDQRPDTDGTKCIACNIDGCIRCSEENKCGQCGDDYKLEGGRCVSSGANRGGLSTGAIAGISVAVIVVVGGLVGFLCWWFICRGKA

SEQ ID NO: 27 - protein, 55 aa, Giardia intestinalis
MCLEMGDGTGDNTGGSVNRGGLSTGAIAGISVAVVAVVGGLVGFLCWWFLCRGKA

SEQ ID NO: 28 - protein, 833 aa, Giardia intestinalis
MIGFVSLLLCGIFSECTQDSECGGAGGTCDVTIGGKKYCSKCDGARVPVNGVCRLLNVSRSICQVPLNSAGTGSCTGCIRDFLFYRGGCYRTASLINAICKEKHIVEEGMYCGACAIEGDVPIDGVCVSASTDSSGNTCDKGVCTTCASGYFFHYGSCYKFGGSPGSTVCPKPTSTTGSVCDSCGSKFVKNPSASSSATSCLACYGLDGTLFCERCRMNVLTSADVKPTLCTQCKIGYVPVDGRCVSTYSATSALAGCSTYSGNENTKGLCETCSSGYMLFYGSCYSVNGPLAQAICKTENQIYLGGRVFCKRCAQTDHYPINGLCIADKGSHTCEAGICTACDTSMTSVDTSKVFLFYNGCYDANSAIGKLICQEASNGACSTCNTNETSNIIANPNSADGQPKCLGCWDEAATGVANCGGCAAGTDGDSKIVCSKCTDSTEPKDNTCPQALPPTTPEGCAVQGCQACSKDSATTCDACFEPLIMKEDKTKCFGSCLALGPGYYNNSGICSPCIENCLLCTDGATCSQCAEGYYLEVSGAGSTTGTCKACATGCSTCASAGDNLCSTCAVGYYAAFAPRRGETGKCILCNASGDGYTGVANCAVCYSTTGESGNKNVVCNTCDDGYIKQHTGNTVVCNLPTPECNAAMCSVCVENNPDRCEHCTTGAYLCPRTATCTKDCASCGGSMYPDDDLGECQPCDIANCRVCATGLKCESCAESAVPISPDVYHTACMGCSDTGGMDGWVGLAGCTTCELTDKGGGSVNCLDPGYYRRGGLGGGAIAAIVIVVLLVLAVAGFLVWWFVFRRGGRPKRGAKYTSLMRGESYDYRQSLI

SEQ ID NO: 29 - protein, 128 aa, Giardia intestinalis
MTAAICTSCDNSKKPNKGGSGCFTCAIDGCSHCNRDNMCEACNDGKKVSPGRKSCVDGCPSNSTDTDSVCVCSDGYSLDSSGASCVSSGANRGGLSTGAIAGISVAVVVVVGGLVGFLCWWFVCRGKA

SEQ ID NO: 30 - protein, 805 aa, Giardia intestinalis
MLKLLLLFFVGSFCGLPTGTYCNGFGIECGQGHEHCFSGRCLLIGSTKVCTRCVSGYVPINGVCQPYPGSASSVCIPEEAESSIRCIKCKPNENVFLFYGGCYTVDRSAVGGQICSRASNGRCVECNVSTHGAYVFTNPNETAEERCIACSDSIGFSGYGGVLECYSCTQPVTGGKTTALCTKCRSPEQNPIDHECRAKGLHTCFSGLCVSCYKTHLLYHSGCYSRGSDTGLAICAAKNQYVLDNVTICKECVNTLYAPKSGVCVPVDGDIPVMGFSDCTKDNDKGLCINCANSAEYFLFYGGCYYKKSGIGSRLCSAVVSGVCTEWKTQFDFIFNKNDNDGGYLCGDATNGGVSDCATCSYESGAVTCTSCSKGYLGVDGKSCSKSCSGDTRGVCTKVTEGSESIETSCRCVCMPTFYSSSGTCTPCTDSCAVCKDGTPDGCQICKPGKVLEPSVVTNGNAKCVDECTVGDNCAECGITIDGSRYCTRCKDSNMYPLNGVCIPNTQKDAYCTSKANGACTACSEAAFLMNGGCYTTEYYPGSTICDKQSNGKCTTTKKGYWISPDGKLLECDPTCLACTAPGPGRCTRCPSDKLLKRASGAATGSCVDPGACVDGYYADGDACLPCATPGCKTCGHASFCTECAGELFVSLDGQSCLEECTGDKVVGEVPGGVRRCWCERGFLPAPDKSGCVPAPECPPDMSWCASCDMSGRCLSCVTSGHNVQVDQRTCAEGCGARASSNQGVCMCETSTILDKGVCIPVNTLTGRKMVVVTASAASAVLVISALIGFLCWWFICRGKRRYYR

SEQ ID NO: 31 - protein, 741 aa, Giardia intestinalis
MFDKLIFVSLALQMALASQTASKAKTNPTPCAAANPGATNCAADSCNVEIGGQTFCSKCTGDKVPVNGECKAKTDAGMCTVGTNDKAGTCTACTNAHYLYKGGCYAECPDGTQKNEGRNTCDEVAPAGPTPCAAANPGATNCAADSCNVEIGGQTFCSKCTGDKVPVNGECKAKTDAGMCTVGTNDKAGTCTACTNAHYLYKGGCYAECPDGTQKNEGRNTCDEVAPAGPTPCAAANPGATNCAADSCNVEIGGQTFCSKCTGDKVPVNGECKAKTDAGMCTVGTNDKAGTCTACTNAHYLYKGGCYAECPDGTQKNEGRNTCDEVAPAGPTPCAAANPGATNCAADSCNVEIGGQTFCSKCTGDKVPVNGECKAKTDAGMCTVGTNDKAGTCTACTNAHYLYKGGCYAECPDGTQKNEGRNTCDEVAPAGCNLPNCEVCSEDKQKCTKCQSNYFLTPEKNACLGSCPAGTYLSGQTCAPCDPSCAECSGAGASKCTACPAGKMLRYADETKLNEGGQCVEQCVEGPECETCGLTIGGTKYCSKCKGSNVPLNGVCTSNAARTRFCTTAANGACTVCAAGYFIQEGGCYETTRQPGKQVCALTDNKGKCQTCTNSLGPDGAGTCPSCDPTCKTCSAANTANTCTTCATGYYKTALEGACTSCENSNGDITGVKDCLNCAPPPNNKGSVLCYLMKDGDSTGGSVNKSGLSTGAIAGISVAVIVVVGGLVGFLCWWFLCRGKA

SEQ ID NO: 32 - protein, 168 aa, Giardia intestinalis
MLYLVGLAFAYLALADPKSCTNSQNCASGDNCLDVNMNGSPTEVCTKCEPNNVPINGACQLCGEGHYLYSGGCYAACPQGTPNPETNTCDGVPTPDCNLPNCKSCPDGTCTECNDGFVPSNGSECVSSSVNKSELSTGAIAGIAVAVIVVVGGLVGFLCWWFLCRGKA

SEQ ID NO: 33 - protein, 331 aa, Giardia intestinalis
MYKSGCYKDSQAPGNTMCETATDGVCTLTKAGYFVPPGADASHQSVIPCGDEEEITVKDGKKYKGVPHCTRCNTPDAATDANAKAATCTACEDGYFVDSSKGCTACDGSCKTCEATRDTKRKSCTEETHFLGAASGGEGKCISCGDASDSTWKGVDGCLKCTTSGKNTPATCTECQEGKYLKGGDPTSCILRNACTGTHFPNDNAENKKKCLPCGDHVNGGIEHCLECALIEGQVEGVLVTCTKCSTRKKVSPGRKSCVDGCPSNSTDDNSVCVCNDGYSPDSSGASCVSSGSNRSGLSTGAIAGISVAVIVVVGGLIGFLCWWFICRGKA

SEQ ID NO: 34 - protein, 627 aa, Giardia intestinalis
MLLVAFYFVLSALAAACKQAQNCANERCEMVGETEICTECKDQGNVPVNGVCMPKDNDAVTTAGCKKNGGADLGAEDKVCGQCDGVHFLYKGGCYSTADATGQKLCTDAAEGVCSAAAVGYFIPPGAQKTDQSVILCGDVTEITLTNGKKYKGVQHCTVCTAPEAAESTAKPAVCTACDEGFFAASEGTCTACADNNNCAKCDAGADKCTKCKATAANKYFKDSGDGTGTCVNEQTCKEQSTHFPKDDPNNGNKCLSCSDDKSGGIADCKTCTPKENSEGPILITCSACATDTNKPNVAGTKCIACTVKDCKKCNDDGTCAECDNTRKLTPTKECVDKCEKLEGYFDGDDGTCRACNSVCKTCNGEDPYQCTGCPAKKVLKYTVESTPDSGSTCVDECTTNTNGCAECGATIGEAKYCSKCSDAKQAPLNGNCTASVRAAASCTQIENGICKKCATNYFLFEGGCYETTRQPGMQICKDAAGNDGKCKTCANNLPSNIDTGACPSCPAGCATCTAAGQTYTCQTCLAGYYLDSTKNLCIKCTESSGNIQGVTNCVSCNPPAGNSGPVTCYVKKDGTSDGGNDNSTGGSTNKSGLSTGAIAGISVAVIVVVGGLIGFLCWWFICRGKA

SEQ ID NO: 35 - protein, 646 aa, Giardia intestinalis
MLLGLLLFCTVARANCKAGNTPSANGQTCVPNADQCEDPLTTAGCATCTGTGSAQTCLTCSSSKKVRPDKKGCIASCPPSVTTENSGVCECTPGNKPSSDGTTCVPNADQCEDPLTTAGCATCTGTGSAQTCLTCSSSKKVRPDKKGCIASCPPSVTTENSGVCECTPGNKPSSDGTTCVPNADQCEDPLTTAGCATCTGTGSAQTCLTCSSSKKVRPDKKGCIASCPPSVTTENSGVCECTPGNKPSSDGTTCVPNADQCEDPLTTAGCATCTGTGSAQTCLTCSSSKKVRPDKKGCIASCPPSVTTENSGVCECTPGNKPSSDGTTCVSETACNTPNCKTCDNPKTDNEICTECNDGDYLTPTKQCTQSCGAIGSYYDGDKACEPCDPSCAGCTTKGPAKCTLCPPGKRLQYTNDDPNQGGSCVDECKAEVDGCAECGAVIGGTKYCSKCKEDKWAPQNGVCANSVTRNSFCTNAAGGVCTQCAADHFLQDGGCYKLGRQPGIQICTLADSNGGCQTCANSLQPNDGACPSCHSTCKTCSTADSSDKCTSCAAGYYMVGSGPNTCISCDSNSGSVKGVAGCMSCAPPPNNQGSVVCYLINDSGSTNKSSGLSTGAIAGISVAVVVVVGGLVGFLCWWFLCRGKA

SEQ ID NO: 36 - protein, 860 aa, Giardia intestinalis
MGVANCAQCQAPQSAGVVTCTECAAGSYKSPNTNECKVCDKACLTCSGEGATKCTLCASGKYLDGNNCVEASSCNGDKYPDPSTGKCTACNGAADQGGIPECTACTYDAKLQKPVCSACNGKKVKTELDGTTTCVDMSSGCQDDYHFKDGDTACLLCGDESKGVPNCATCTAAQQCTKCLPGFFKTSDTACDACGDNCATCSVAGDPNKCDTCMPGYFLVTTTDPQGKKCVACSDTTNGGHEGCSLCSNNNGFKCTDCKPNYKKQSNEDANDDYTCVKTCEDPTACGGTSGACDAMIIDDKGNAKHYCSYCGDSSQAPIDGICTSDSGKKGANTCDSHTCTQCTADYFLYMNGCYKVGQVPGSHMCKKADSSGICTEAASNKYFVVPEAQATDQSVLACGNPLGTLVDPQGTAKAYVGVEGCSQCKAPTAPSDGGMTPAVCTSCDNSKVPNKGGSGCVLCSDTNCKSCVVDNICEECKDGLYFKAGETPSCVSAEECKDGFFPTTDAQGKKVCAKCSDTANGGIADCAKCSLKAASARAGPIVTCSGCETKRLSPLNDACLEECPAGTYPDNRDSTGICASCHNTCASCSTNAETSCTACYPGYVLSRSSDDTGTCIKECTGDFMAHCKADGCSLNVGGSKYCDQCEEGYAPVDGVCTSIPATARDASGCKASGGKCTECGANYALLSGGCYNTQKLPGSSVCTAAQNKGQCQTCANGQSPAGGKCPACTEGCVKCAGSKETCTDCLAGYYKTTDNKCVKCTSNSGTDGNAITSVKGCLNCVPPIGSNTGSVLCYLMKDGNSTGRSTNKSSLSMRTIMEISVAMVAIGALVGFLCWWFIFRGRRIDASPSTMTLIPSKSI

SEQ ID NO: 37 - protein, 191 aa, Giardia intestinalis
MCAADRARAGVTCHACAEGYGLSGGSCSPCTAAGCARCDGGVCTSCKRGWHLAGDRCLACPSPCAACSSAASCLACADRYFQATPLGGPRDCVPCDQTAPQGLRMAGIHGCGLCQAQAGSGAVLCLRCADGNLPLENYCGGSSVKRRLGPGAITGITLGVTVLVGGTIGLTFSLMASKHKSQASGLRPLTA

SEQ ID NO: 38 - protein, 2529 aa, Giardia intestinalis
MLAIIFGLALSCTHGNRPGECAIGKCTILEGRYCSECATPGEVPINGLCIPYDDPRAVASGCASEAGKPLKNSAKTCSSCVEKNYFIHEGGCYNILYSPGNLICVDLARNLCKICSLGYYLDTQATPQTCKTCHAHCSSCSGSSENQCLSCPPDRFLDGSLCKRCSDKPYGIENCRSCTMSTSDSLKCLSCQAQYYLAGNQCLTCPSNCLMCTGATPNECLLCIDNYSYDSQTRTCILTCDKSKIAKSGKCAEDGCTAFENKLCAHCSLGTEVPINGVCTSNDQNICLHISISLGMCDNCGKGYILFQGGCYRVDTELGLKACAYTTDIRGATFCAKCGTPGFVPINGVCVPYNNPLVVTSGCRDSAGGLPTPVSIKCTSCGKNYFIYQGGCYSPESAPGNVICNEVDNAGKCKACVDNYFRNRGDCIPCHSNCASCLGPNANDCTSCAPEIFFQVFSMGKGMCKYCNDVLLQYDNAGIAHCAKCLPLPRGQRAQCTVCERGYLLTENHCEISCWTNGLAPGSCKSDHCNIFSSALCSCCANDNECPINGQCTSALMGAKVVSGRCTECPPRYFPYKGGCYEKGTPIGLSICKDVDDTATCSVCASGYTHVGSECRPCNIKYCVNCDGGVDVCNSCAYSYQLQKNEGKDSCVKACTEELTPGGCIYGGCVVRDKTFCERCSIEREVPIDGVCRPLREDAPECAVMEGGRCRRCSKGYLLYYGGCYNTIKPVIPICEKEHTLTGYGFTYCKKCTLETEYPINGSCTTETYGNTCKEGVCTGCGAGYFLHRTVCFTPEFYPQICTKARAGVCEVCGPTYYLNPVRSSTIQSCIHCSDVGGIFGYTGIAFCRTCLAPLISGPGHCTSCLDRYLLVNGVCEESCPLPTDSLQPRSGQCAVDFCNVLGATFCSKCALNTDALIDGKCTSVDKENICKKSGVPNGTCTGCAGLFFYYKNGCYNPKTYPGNAICGEYAVMDGVTYCFRCSILSDLPVNGHCIPMSDSKLSPCVLARVPTGRCYYCVDNHFLLKGSCVSADLAPGTILCKSIGSDNGICDICKEGYYAPPDRSSISDSCVPCTENSDTLKGIPHCKSCKVSNGLLVCVACEQFYRPMNGGTECVQTCVEAEADPKEHRCRKDKCDVLGTFYCSQCAADAEGPVNGVCASVAAGVCIQYKQANGTCKYCTHRYIKYKGGCYEAGSFEAGDICDAQDVVTSGAGSFCAKCKQKDEVPVDGECKVSDDCTVKGDGICRSCKQGVKSFQITKDGSPATVACFTKCPDGMYESAEFCQMCDKSCKTCQDSATKCTGCADGFYLAAGKCVACSVLHCLTCDAANTCASCQDGYYASGNSCVACTPGCKKCDSTGCKVCKDRFALRNNICTEECPVGLLPTSCAAGYCNVNGTLACSRCALLSSVIIDGKCKANDDACIRTTPSSGTCAACKDTHLLYYGGCYAKGATAGTAICDSQHQATLGPYTICKQCKRDGEVPIDGSCVALANTRAIRSQCVAATPSPTSCTRCGPRFFLHAGGCYEIGRSPGTVVCAVAVDSAVAGVCTSCASGYYSTDLLDPTKESCILCNDTGATNGYTGVDGCTECYPSETPKRVICTRCKDKHIPSEDGSRCIQSCNDSRSESGNCKAGSCTAMGSLYCSRCALDDEWPINGACTGHDTDYVCEKGKGVCTGCLRGYMLYMGGCYDPAAIPGSGICRELLTVGRRTYCKQCNLAGEFPINGLCTKDVPDGVSCSSGLCVICPENYFFHEGGCYDITTTPGSGICEVLGTGRDAGTCRRCRPGYRHNKETLTCMSCAVSNCASCEIDVKYCTECIQPYTLTGVGAGAYCTKPCKRVGQDACSWGSCTVMDGSLCSQCASSDYVPIDGVCTLYPGEARSLAGPCVKDAKKGRCTACRGSYFLHQGGCYSAGEYPGTGICDERDAVVVDGQVVCGRCLIDGEVPLDGTCAEPKEGLICSKGVCSHCGDGMFLFEGACYTKERAPGTSICGDTTESTSGCTACKAGFSKTDKGCVRCSDPNCGACVDDPNTCTACRAGYYLQSTSCIACHPACKTCDGMGADKCKECAEGYFGTFTTPGLGACLACSDTSGRDSWVGVSGCRLCEAPKVAGPALCKDCLPGYKALSTGTEVTCHAVCPMTYYEAADSCIPCAIDNCATCTSTRCTSCVPEHIWNGEECVPKICPPQCLCREQSIACIGCNENAVEVRPTHSSASRCLLCNDAGAGGGWTGVDGCQRCRLADRVGPVVCLACESGRKALTLDGMLLCPRDCPTEGFWTSGSECIPCAPGCLRCTSATTCSACSQGYYSTQSSVSAPSDCRPCDDVTSQNGFTGIPHCAVCAADRARAGVTCHACAEGYGLSGGSCSPCTAAGCARCDGGVCTSCKRGWHLAGDRCLACPSPCAACSSAASCLACADRYFQATPLGGPRDCVPCDQTAPQGLRMAGIHGCGLCQAQAGSGAVLCLRCADGNLPLENYCGGSSVKRRLGPGAITGITLGVTVLVGGTIGLTFSLMASKHKSQASGLRPLTA

SEQ ID NO: 39 - protein, 479 aa, Giardia intestinalis
MYKSAPRPIIPQERCDLSLSLTGLVLTEARENCTISWPLVGVLLSRSSPVQLIERARAAVSHCSRSMHQPSGRAVARVLRLMLLGFLLVCAVTQASCAAGCKTCDPGDQTCTACTNDSHKIQVDGKSCDAACPAHSAASSNVCECEGGYRPVTGENRCEKASNTQCNTPNCKTCDNPKTDNEICTECNDNNYLTPTKQCTQSCGAIGSYYDGDKACEPCDPSCAGCTTKGPAKCTACPPGKMLKYTNDDPSQGGSCVDECKAEMDGCAECGAVIGGTKYCSKCKEDKWAPQNGVCANSVTRNSFCTNAAGGVCTQCAADHFLQDGGCYKLGRQPGVQICAAVGPNSLCTTCVNGQRPDTNTGACPVCPTGCDTCTGTSSRAPECQSCLLGYYFDSDKKLCVKCTENSSAIQGVSSCVSCAPPSNNQGSVVCYLINDSGSTNKSSGLSTGAIAGIAVAAVIVVGGLVGFLCWWFLCRGKA

SEQ ID NO: 40 - protein, 817 aa, Giardia intestinalis
MLGLLSVLLFASFCEAAAEIYYNSFGVACKNNQNNCAQNRCIFVGRDELCTQCVSGYVPINGTCQLLDASSVCIPDDASSPTRCVECKSEQNVFLFYGGCYTIDQSTVGSDICCQATGGKCTECNVQTIKKYVFTNPDVGAAEKCILCSDTVGFNGYKGASGCLDCLPPITDKVGIALCFECNPRSLYPIDYQCQAKGLHNCINGYCTSCHKTHLFYEYGCYSRHSSTGFAICAGANQYELDNVTICTECVNTSHAPKNGGCTFVGESASGSLFSDCTKDASRGLCTGCSSTGKSFLFYGGCYDRNSFIGSRLCQKIDQGKCTQWSSTFDFIFPKTDTSSGDRYLCGDAGNNGVRGCATCGYNNGVTCTRCSAGYLGVDGKSCSESCSGDTRGACTEIVEKSSSTKILSCRCVCRPTFYNSSGTCTPCTNSCAVCKDGTPTGCQQCSPGKILNFSIASSESADCVSQCSVGSECAECGITIDGSRYCTRCKDASTYPFNGVCIPNTQRDAYCTSTTNGACTTCSGAAFLMNGGCYTTVHYPGSTICGKQSNGKCTTTKKGYWISDDGKLLECDPTCLGCTAPGPGRCTRCPSDKLLKRTSGATTGSCIDPNACGDGYYADGDACLPCATPGCKTCGHTSFCTECAGELFVSLDGRSCLGECSGDKVVGEVSGGVRRCWCERGFLPALDRSGCVLPTECPPDMPLCAACDESGKCLLCAASNHNIQIDQRTCAEGCGARASSNQGLCMCELDAVLTKGVCVPAKELARKRTAAIAGGTVAGVVVIGVLVGFLCWWFLCRSKHIGASSSTTALVRSKSV

SEQ ID NO: 41 - protein, 421 aa, Giardia intestinalis
MLYLAGLAFAYLALADPKSCTNSQNCASGNNCLDVNINGQQKEVCTKCEATHVPVEGACQAKDGQDKCTPQDAPDGTCKACQGSTYLYSGGCYTACPQGTPNSETNTCDGVPAPDCNLPNCEVCSDDKQTCTKCQGNYFLTPEKNACLASCPAGSYAVGQTCGPCDPSCAECSGAGASKCTACPAGKMLRYADESNPTDGTCVEQCVEGPECETCGLTIGGTKYCSKCKGSNVPLNGVCTSNAARTRFCTTAADGACTACAAGYFIQEGGCYQTTRLPGKSICTTDSGGKCQTCANGQNPNSGTGVCPLCDSTCKTCAAGQTQQCQTCFSGYYKSGTKCVKCDASDSQITGVTNCVSCAPPSGDSGSVTCYVKMDGTDNGGSVNKSGLSTGAIAGISVAVIVVVGGLVGFLCWWFLCRGKA

SEQ ID NO: 42 - protein, 638 aa, Giardia intestinalis
MRSRFRWSLCSTEFRDMKQGSVRLLMQTRAVLCQLLASMLVGIGLIFAVALADACSPSIDGCAECDSTGQGCTKCDANGNTPYLKKTNPGDQTGTCVSKEDCTRDGGYYADDTTDPNAKECKKCDATCAACSSGLATACTKCEAGGATPYLKKTNPGDQTGTCVSKEDCTRDGGYYADDTTDPNAKECKKCDAGQKPNTAGTQCFACPDSNCERCDQSDVCARCSTGAPPENGKCPAATPGCHSSCKDCVSGANTSEDDKCLSCSGDNYLKVTDTDAHSGVCVSASACTSDTTHFTKEVADSTGSKKMCLSCSDATHGITGCKKCALKTLSGETESTVVCSECTDKRLTPSGNACLEQCPAGTYADNINGVSVCASCHATCAECNGNADAASCTACYPGYSLLYGSGTAGTCVKECTGAFITNCADGQCTANVGGAKYCAQCKDGYAPIDGICTAVKTGRDASVCTAAGGKCTKCAGEYTLMSGGCYGVAKLPGKAVCTTANNGKCTMCAANNRAPVQEKCPECSEGCAKCNDSNACTECLPGYYKGAGDKCFKCTASSGNNNQITGVANCVSCAPPAGNAGGPVTCYIKTDGDNTGGSVNKSGLSTGAIAGISVAVIVVVGGLVGFLCWWFVCRGKA

SEQ ID NO: 43 - protein, 715 aa, Giardia intestinalis
MLIKRSPCLLSRTSHRLQTDQKVGAAHVRPLDRPHKRCLATQHTDIRCAGSLYWMLYGLLAMFEKILFGILILQVARAAKTCTEASSDPQTGQCKQGKCISIGGDRVCTDCAKPGEVPINGECKDKSDGLITTAGCEKVDGALDEHSTTCGKCTKAGYFLHKGGCYVQAAPPGQTVCKSASSSAGLCETCNDANGFFKNMGASDNTHQSCIACNEADTIDGFRGVPNCKVCTPPEGPGSATCTTCEGEYYLLAVTPSSCVEKTQCKTDHFPVTAKGIKKCVPCGDTDAGGIIDCKTCTLKEARGLAGESAIKCTTCNGGKTPNDEGSTCVDAPEPPPSDCPVENCQKCSADKKTCEECKDKNYLTPTGMCIKYCEYILGYYSSTEGGKGICKKCEVKNCVVCDPNGKCGFCEDGFYADDAGICQKCDGSCKNCKGNTANDCTECKPGTILDYANGQKGKCAPECVVNTDKATGNCKACDLIVKGTRYCSACSQDNEYPQNGVCAPKPSGRAATCTSQGTGVCNSCANGLLRMNGGCYEDEKYPAHSVCATVATTGGTCDRPMPGFNLNNENNLVICPEGCKTCNTANECTECMDGYIAFSNVKACTKCHESCYTCETAAATCKVCARGYYKESSDSGPCKKCSEGLAGCRQCTVSSTSAFMCLEMGDSTGDNNGGSTNKSGLSTGAIAGISVAVIVVVGGLVGFLCWWFVCRGKA

SEQ ID NO: 44 - protein, 72 aa, Giardia intestinalis
MKCSEKISGCKQCVSSSGSSVICLESEVGTGGSTNKSGLSTGAIAGISVAVIVVVGGLVGFLCWWFLCRGKA

SEQ ID NO: 45 - protein, 616 aa, Giardia intestinalis
MFEKILFANCILQLAWAACLEDDGNPGTHDTTKCKKGHCDVSIGEQPYCSKCSVDNEHLVDGTCVVSATDQANTKCIDPVEGKCGSCKDGYFMYKSGCYNSGGSPGNEMCTSAPEGKCSTPAAGYFIIPTTDADASHQSVVSCSDSEGANGKSDKIYKGVEGCAECTLDNLATTATCTKCTTDFLHAPIEGGTACLTECPEGYFGHTATSGKQLKTCQSCSSPEASLIPAATGVPNCVKCTYDTKVVCEKCDQDKYLKTESGTTSCVSAEECKDGFFPTADAQGKKVCAKCSDTVNGGIEDCAKCSLKATPASAGPLITCSECTTHNLSPLKDACLTACPAGMYANSKVCTPCHESCASCSNDAEASCTACYPGSVLNRSSGDTGACIKECTGRYAENCEADQCKAVVGGSKYCSRCKAGYVPVDGVCVSTTTRAPTGCTPGDGVCTACTGSYFLQSGGCYSAGAFPGNTLCTTASDGKCQTCANGQAADTTSGSCPACPDGCSKCATSGSPKACSECLPGYYKSGSSCVKCDASANGIVGVPNCISCAPPAGGSGSVTCYVKTDGTSGGDDNTGGSTNKSGLSTGAIAGISVAVIVVVGGLIGFLCWWFICRGKA

SEQ ID NO: 46 - protein, 632 aa, Giardia intestinalis
MFCRLIVAGFVLQLAWAAPEAETCTEAGEGQAGKCLTSKCDVWINGKKYCSQCAKTDEYLVDGGCKAEAGASGCQLKARAADGTCTQCAQGYFLHKNGCYAIGGDVGRFICADAAAASRVSSTTPGVCEGCVVGYFKNPSAANNKDSCIACNDATGVGGKKGLEGCATCDPPSSDVAICKTCLEGFFGTNLGNAGSTCTACTDRDNCAKCDGGAGKCTKCKATANKPYLKKGETEDSNTCIDKSGCNDNSHFTDDADDPTNGKMCKKCSEGIADCKTCALKDNPEGTILITCSACIAGTNQPNADGTKCVLCDIQDCIKCNEENMCEECTGGKSLNPLKNMCMEGCPAGTRDVSGICTNCHNSCAECDGDSEASCTACYPGLVLSKSNTGATGTCIPECTGRYAENCEAGQCTAVVGGSKYCSKCKAGYVPVDGVCVSTTTRAVTGCTPNDNNDGTCKACTTTYFLQSGGCYQSAAYPGSNLCSNAQNGKCTNCANGQQPEASTGSCPACASGCKTCEVANKEACKTCLPGYYLAGAKCVKCDTNDPNDGSHIVGVPNCISCAPPTGNSGPVTCYVKTDGTNDGGNDNNAGGSTNKSGLSTGAIAGISVAVIVVVGGLVGFLCWWFICRGKA

SEQ ID NO: 47 - protein, 140 aa, Giardia intestinalis
MAPAEILEETARTRAASPRAPSRGSPSLWSLSWGASWASSAGGSSAGGRRDLGSECCTVIVIVLCGVTCSVGDCKSCVMDDVCGECSDGFSIEGGRCVSSGTNRSGLSADAIAGISVAVVVVVGGLVGFLCWWFVCRGKA

SEQ ID NO: 48 - protein, 618 aa, Giardia intestinalis
MQHRQMPRRGGLVNRAVMACVTERRAIMFYAVLLIGLALQLATEECTPVSSGGPNTCKACDAVINGKKYCSQCNDTGNSDSSGAPTDGVCSADNNECSQKQDGKCTQCANKSFMYKGGCYKDSQAPGNTMCETATDGVCTQAKAGYFLPPDADRDNAHQSVIPCGDDTVVTLGNSKQYKGVPHCTQCEKPTEASDTTTAKAATCTACEDGFFGATCEACQDENCATCAMTGNNKCSKCKGTGTKTYLKVDGGSTGTCVEASGCTAATFPKVDEQQGNKCAACNSVPDGGIANCATCSLLTQGSRAAPLVTCLTCEQNKYLTPEKNACLDTCPAGMYAVSGDSGNVCTPCHESCASCSNDAATSCTACYPGHVLSRSSGDAGTCIKECTGDFMAHCKADGCSLNVGGSKYCDQCEEGYAPVDGVCTSIPATARDASGCKASGGKCTECGANYALLSGGCYNTQKLPGSSVCTAAQNKGQCQTCANGQSPAGGKCPACTEGCVKCAGSKETCTDCLAGYYKGAGDKCFKCTDSDKASSNAITGVENCISCAPPAGGNGPVTCYVTQQKADDGTGGDTGGDSTNKSGLSTGAIAGISVAVVAVVGGLVGFLCWWFLCRGKA

SEQ ID NO: 49 - protein, 190 aa, Giardia intestinalis
MLVLALIWSVALSYEVQCIEEEDGQCVRCPRGYIVNQRLNACVWNRASEPPIICPEGYFLDKGLCTLCHSSCETCTGSAEPNGCTVCAQGYYPAFTEASGLCIPCSTSHGVVAGIPGCVHCARDGDSLYCFERRQLKSNLATIRKTLVISLVVLVLALFSSLILIFAGGSKIKHRQRRLPVRYVARHKMV

SEQ ID NO: 50 - protein, 197 aa, Giardia intestinalis
MFDKLIFVSLALQMALASQTASKAKTNPTPCAAANPGATNCAADSCNVEIGGQTFCSKCTGDKVPVNGECKAKTDAGMCTAGTSDKAGTCTACTGAHSLYKGGCYDECPYGPTANERVCADAPAGCDLPNCKSCPDGTCTECNDGFVLGDDKKCVPSSVNKSGLSTGAIAGIAVAAVIVVGGLVGFLCWWFLCRGKA

SEQ ID NO: 51 - protein, 1609 aa, Giardia intestinalis
MHTWILTLLMCTCSNRHHYLHNSNHYLKGGALCRLAAKAGTAERILFSDVSDCPENCTSCTDPYICEVCDHGYTLTNRGRCVDLCIEGDSETNCAVGHCTVFDDTLCSKCAHEGDVPAAGVCNTGVTTCVKDSHGICISCESGHLLYRGGCYPSKSALAQSICATDNQIVVEGMLYCSLCNDENEAPINGHCTDEHSSYCDAESGQCINCVADGYFLFNGGCYNANEHPGSAICAEVRDGECTECGSHYPVTDGVCTYCPVDHCLLCENESCTQCQQGYVLRSSGRCVKLCSEGNGLQSCAIGHCTAFEGTLCTKCAYEEDVPVAGICTSGLTTCQKNFSQICISCEGEHLLYSGGCYATTGSYGLQICSIENQIAIGGKVYCSKCNQKKEAPLNGECTEAAADHCDVRDGACTGCKTTGYFLFQGGCYTLASIPGNIICAEVSGTTCIKCRDGYGIHEGECSPCTIAHCLDCKSDVATCNACDPKYFFTGTACVACEGEHCAACRDNMCVDCTDKTECNACAIPNCVLCDPALTECLACQEAYEPDEDGFCTPLPASECPLSCLCADQDVPALCTSCKPGFIAAGVVSGDTCLSCALEVEHCGLCSYIPESDSIVCEECLDGYRMDDGLCEPCGNGCKSCPHRANKCAECFAETPYFNPALTECLSACPPNSVAATNKKCSCIHGYYSTLQGCEKCDESCDTCSGGEIDKCVTCRSGFFLASGSWKGQCIPCDLSSFSDGSVIGVEHCIDCRGVQENGDLIVVCKECDLGYTLKGEVCVLDDSGHEDCPSNCICTDVSPTCVSCQRGYFTLSTPSAENCVRCSSAISGCKTCTVEGSSLRRSTSKVTCTLCDDGKGLVEGTCHSCHVTCKTCNGDPELCSTCYNPAYKLSLRSDQCVPECPEFSEEQNGRCVCLLGYSISFNGLTCVKDSSACPSICTCAVGNICSGCADGYFTFDPSRTDAARCEPCSGDFCSSCGRVPNDATFFGHTFSPGRRYAYRRSLESVNICIECADKQGCSACSIEGCNRCSASEHTKCTECMPDYQLSQDKKSCIALVPICPLGCTCVPGTSTCNGCADGYFEVDPTDEASGRCMRCSIPTRYIPTRISGARRLERLLSIRRKRTDSISLQIVRDASWNGVAGCAMCTTPSSPGPAICTQCVQGKHLLVSGESTQCLDACPDGMGSINNVCFNCNDENCLRCDENLDSCVECRPGASPTLTPDTELVVCETVCPLGCVCEDAEDSSICTGCQSGYYEVSVLARFIMRLRKTDVHCKKCLANCMTCTDESTCLVCADGYILHQTDASCVEKCDQGYYNKQGQCAPCTGEHCTSCTNETTCTSCTDSSFLSNGECVTCSTSCKTCGGGTENDCLTCPTGTVHSTGTGLGSCLQECSATAAGNCAVCNAIIDGTRYCSKCTPGEAPINGRCEPVSAARNVMCITSGDGTCESCSGGLFLFNGGCYATSRYPGSAVCTSSSDGLCTNCADGFTNTNGICSNCVLGCSSCSSTAASACTSCTEGFFPAFSGSQGVCKRCDDTTITDGYQGVQGCRICIAPQQAGIALCLDSSEAGNKSSLSAGAITGIAIAVIAVIGCAVGVLVWFLCCRRSKAV

SEQ ID NO: 52 - protein, 137 aa, Giardia intestinalis
MCVASGADPKGQACPTCPDGCLKCTGNVGSQTCSSCLSGYYLSTNKCFRCTAGDGASANAITGVENCISCAPPTGGNGGSVTCYVKNDDSSGSGTGGSTNKSGLSTGAIAGISVAVIVVVGGLVGFLCWWFICRGKA

SEQ ID NO: 53 - protein, 403 aa, Giardia intestinalis
MLVGFLLVCATVLAKHNEKTAPCEVEGCDVCEESNPQQCKTCGSGYTLNPTTKKCTKNPASDCGVQNCAQCVSGDNTRCETCSPGFDPNDDGTQCTPQADCPIVNCQTCSPDKQTCEECEPGKHLTPTKKACLDACPVGTYLSGQTCAPCDPSCAECSGAGASKCTACPAGKMLRYADESNPTDGTCVEQCVEGPECETCGLTIGGTKYCSKCKGNNVPLNGVCTSNAARTRFCTTAANGACTVCAAGYFIQEGGCYQTTRLPGKSICTTPTGDGKCQTCANGLTAVSNMCPLCDSTCATCTEANQPNKCSACPPGRYLDASKACKLCTETSNNIQGVANCASCAPPSNNQGPVLCYLMKDGGSTNKSGLSTGAIAGISVAVIVVVGGLVGFLCWWFICRGKA

SEQ ID NO: 54 - protein, 200 aa, Giardia intestinalis
MLSKLLFVSFILQLAQAVQVVEEAKAAVSAPTPCDAADPGATNCAAGKCDVTINGKTYCSKCKSGYVPVNGACTQQAQANMCTPGSGSTDGTCTACTQTQKLYKGGCYDNCPYGDGSAPNTCADAPAGCDLPNCKSCPDGTCTECNDGFVLGDDKKCVPSSANKSGLSTGAIAGIAVAAVIVVGGLVGFLCWWFLCRGKA

SEQ ID NO: 55 - protein, 245 aa, Giardia intestinalis
MLKYTDENSPSSGTCVDGCKPQSGASGCETCGATIGGTKYCSKCSTSTEVPVNGVCTADNARAAACKVKDGKGGCTTCASGYFRQDNGCYKTDRQPGIQICTLASQGDKCETCANSLQPSAAGVCPLCDSACKTCTSANDANTCSSCVVGYYQVGTKCVRCDTNDPNGNKPITGVKDCVSCAPPAGGDGGSVICYVKTDGTDNGGSVNKSGLSTGAIAGIAVAVIVIVGGLVGFLCWWFLCRGKA

SEQ ID NO: 56 - protein, 520 aa, Giardia intestinalis
MGVDNCLKCTAPANNKGVAKCTACTEGHFLHTDGTCQACGTGCSECTSNTVCTHCMPGRYLKTGGSCVDGSGSTCGEKKYPDPTTRECKACPEACRVCAYDDVLQQPVCSECDSGQAKNLLKKKVDGTAECVDENGCPTGETHFVDKTAGTKCLPCGDESKGVANCETCSAAQQCTKCLPGFFETNPTTCTDCTGHCAECGTAGQIDTCTKCLPGFFLKSSGGKECVLCGDSQKGGIDGCDVCEGTEDALKCTKCKVNYRPSGEPSTGVTCTKACEDDTACGGTAGACDAIVIDNDGKELHYCSFCGDSSQAPINGKCVASGSYDSNHCAKGVCTQCTNNYFLYMGGCYSVSAQPGNLMCKTAGNNGICTEAANNKYFIVPEAKPTQQSVLACGNPLGTLVGTGGTAKAYVGVDGCSQCKAPTQIDTLGMTPAICTACDSDRKPNRDGSGCVLCSVGDCKSCVVDGVCGECNSGFSLEGGKCVSSGTNRSGLSTGAIAGISVAVVAVVGGLVGFLCRGKA

SEQ ID NO: 57 - protein, 470 aa, Giardia intestinalis
MGKCHRREPGAGMQAPDPVLCPEAVSGPGNCKPGKCFGIGGEELSYCSQCADATEVPLNGACDNSEETQACTQMSDGVCTQCAKKTFMYKGGCYSTIGVPGVKMCKEATDGVCTSPAPGYFVLPADDRDASHQSVVSCGDGEGAPGRTKLYKGVKGCAECTLSVPATTATCNRCTTKNLSPLKDACLTDCPAGMYANNKVCTPCHESCASCSTNAEASCTACYPGSVLSRSSGGTGACMKECTGKYAENCEAGQCTAVVGGSKYCSRCKAGYVPVDGVCVSITTRAPTGCTPSDNNDGTCKACTTTYFLQSGGCYSAGAFPGNTLCSSAANGKCQTCANGQAADTTSGSCPACPDGCSKCTESASPQQCSECLPGYYKSGSSCVKCDASDNGIVGVPNCISCAPPAGGSGSVTCYVKTDGTSGGDNNTGGSTNRGGLSTGAIAGISIAVVVVVGGLVGFLCWWFVCRGKA

SEQ ID NO: 58 - protein, 39 aa, Giardia intestinalis
MNKSGLSTGAIAGISVAVIVVVGGLVGFLCWWFICRGKA

SEQ ID NO: 59 - protein, 185 aa, Giardia intestinalis
MCSVCVENNPDRCEHCTTGAYLCPRTAACTKDCASCGGSMYPDEDLGECQPCDIANCRVCATGLKCESCAESAVPISPDVYHTACMGCSDTGGMDGWVGLAGCTTCELTDKGGGSVNCLDPGYYRRGGLGGGAIAAIVIVVLLVLAVAGFLVWWFVFRRGGRPKRGAKYTSLMRGESYDYRQSLI

SEQ ID NO: 60 - protein, 792 aa, Giardia intestinalis
MLGLLPLALLASICKSSRDAYYNKFGVGCEGKQENCAQDRCFSIGSWTSCTQCIPGYVPIDGKCQNYSGASSPPCTPDDPNSPTRCIRCTSTENVFLFYGSCYTITTAQNRNLGNFLCSEASNGVCTKCFESKLERYVFTNPDTSAAEKCILCSDTVGFNGYKGASGCLDCLPPITDKIGIALCVKCHYTTEDRHFYPIDYQCQAKGPHNCVNGYCTSCYKTHLFYEYGCYSRHSSTGFAICAGANQYELDNVTICKECANASYAPRNGACILIKENPSIEEIAFKCTKDPTKGLCTACSSSAPSFLFYGGCYDEDARISSKLCSRIGSNACEQWNSAFKWIFSKNGDNNKNGYLCGDIANGGISGCATCNYASGAVTCTRCSAGCLGVDGKSCSEGCSGDTRGVCTKVTEGSESTEVSCRCVCRPTFYNSSGTCTPCTDSCAVCKDGTLTGCQQCSPGKILSFSIVSSESADCVDQCSVGSECAECGITIDGSRYCTRCKDASTYPFNGVCIPNTQRDAYCTSTANGACTACSEAAFLMNGGCYTTEHYPGSTICDKQSNGKCEKTKEGYGISADGKLLECDPTCLACTAPGPGRCTRCPFGKLLKKVSGAATGSCVGLNACVDGYYADGDACLPCATPGCKTCGHASFCTECAGELFVSLDGRSCLEECTGDKVVGEVSSGVQRCWCERGFLPALDRSGCVLPTECPPDMSWCAACDTSGKCLSCAASNHNIQTDQRTCAEGCGARASSNQGLCMCELDAVLRRASVFRPRSWPRRERRRSQEGRWPGSL

SEQ ID NO: 61 - protein, 317 aa, Giardia intestinalis
MEHCEKCSKDNVCEACGSEKKLSPLGDACLDACPAGTRTDANVCNLCHESCASCSTNAETSCTACYPGYVLKRDETNAKGTCIKECTGDFMAHCKADGCSLNVGGSKYCDQCEEGYAPVDGVCTSIPATARDASGCKASGGKCTECGANYALLSGGCYNTQKLPGSSVCTAAQNKGQCQTCANGQSPAGGKCPACTEGCVKCAGSKETCTDCLAGYYKGAGDKCFKCTDSDKASSNAITGVENCISCAPPAGGNGPVTCYVTQQKADDGTGGDTGGDSTNRSGLSTGAIAGISVAVIVVVGGLVGFLCWWFICRGKA

SEQ ID NO: 62 - protein, 470 aa, Giardia intestinalis
MIFVWIVLAGALASCREGILDGDCFLLSCDVILDQVYCSVCTAMTEFLIDGQCLSTNVDNTCRHSFGNGTCDSCAGPYLSYRGGCYRVGEDPGNFICKSEDVFYVDGTALCRKCVVYGEFPIDGSCTKKAQGNRCGTTGYEGVCETCGTGYFYHNGGCYRKNRFPGNKICADSSAVEHIGHCGACLAGYETYKGTCLACEDINCRKCGVSMSNCEVCHDGYYLDRDMHDGKGACVPCNPIRNCETCLTDEECTSCARGFFAGFLKASGHCVSCDKGGDGYAGVPNCQVCLPPHPGTSDMAAFCTECAGGFYLLISEDRTQTSCVVSCPKNKIHYSNRCVTELEGCHSYGRNDECVKCVSGYRLAEGVCERCAVDNCEVCTSSSSVCNICKAGYGLESGMCNLCGEGCRTCDGDVSVCTTCLLRFNYISPGKNCCISTCPEHSHEVFSGELGFCECYGDYKPSADGLRCEK

SEQ ID NO: 63 - protein, 732 aa, Giardia intestinalis
MSAHQTTPPLPGKAGAAQQVGGPMFGRFLLAIVILQLARTACTQEADDGKCKTCGVTIGQEQYCSECNGANYAPVNGACEDVETQADKKALCKAHASGACTTCGGNSFMYKDGCYSSGEGLPGHSLCLSSDGDGVCTEAAPGYFLNPLRANTKDSVVSCSDTTGFTDSGKTYRGVQYCERCDGAALTDAAGGDAKCTRCGQDKYLKDNTCVDKAQCDSGSTNKFVAVDDSENGNKCVSCSDNLNGGVANCDTCSYDEQSKKIKCTKCTDNNYLKTTSEGTSCVQKDQCKDGFFPKDDSSAGNKCLPCNDSTDGIANCATCALVSGRSGAALVTCSACTDGYKPSADKTTCEAVSNCKTPGCKACSNEGKENEVCTDCDSSTYLTPTSQCIDSCAKIGNYYGATEGAKKICKECTAANCKTCDGQGQCQACSDGFYKNGDACSPCHESCKTCSAGTASDCTECPTGKALRYGDDGTKGTCGAGCATGTGAGACKTCGLTIDGASYCSECATATEYPQNGVCSSTTVRAAATCKAGSVAKGMCNSCTNGFLRMNGGCYETTKFPGKNVCEEAAPAGDTCQTPADGYKLNNGALITCSAGCKTCTSQDQCDTCKAGYAKTGGNTKKCVPCATGCSECNADDATKCTVCAAGYYLSKEKCIACDKSDGGSITGVANCANCAPPTNNKGPVLCYLIQNTNRSGLSTGAIAGISVAVVAVVGGLVGFLCWWFLCRGKA

SEQ ID NO: 64 - protein, 727 aa, Giardia intestinalis
MSAHQTTPPLPGKAGATQQVGGPMFGRFLLAIVILQLARAACQADGSGSDGSCKTCGVTIGQEQYCSECNGANYAPVNGQCADVNAEGQSKTLCPAKGQGKCTQCGGASFMYKDGCYSKDTAPGQSMCTQASEGKCTEAAPGYFLNPLRANTKDSVVSCSDTTGFTDSGKTYRGVQHCERCDGAALTDAAGGDAKCTRCGQDKYLATTGTCGEGCTPDTEFSKEDSDNGKRCFACGDVTTGVASCEKCTPPSPDQAKPACTKCGGNNYLKTAADGTTTCVEQSACSPDSFPVENSQSGNRCVLCGDAANGGVDKCAACTPTDQGRIAPTITCIACTNGYKPSADKTTCEAVSNCKTPGCKACSNEGKENEVCTDCDSSTYLTPTSQCIDSCAKIGNYYGATEGAKKICKECTAANCKTCDGQGQCQACSDGFYKNGDACSPCHESCKTCSAGTASDCTECPTGKALRYGDDGTKGTCGEGCTTGQGSGACKTCGLTIDGASYCSECATTTEYPQNGVCAPKASRATPTCNDSPIQNGVCGTCADNYFKMNGGCYETVKYPGKTVCISAPNGGTCQKAADGYKLDSGTLTVCSEGCKECTSSTDCTTCLDGYVKSASACTKCDSSCETCNGAATTCKACATGYYKTASGEGACTSCESDSNGVTGIKGCLNCAPPSSSTGSVLCYLIQNTNKSGLSAGAIAGISVAVIVVVAGLVGFLCWWFICRGKA

SEQ ID NO: 65 - protein, 127 aa, Giardia intestinalis
MLVGFLLVFVVTQANCAPELTRAGCKTCSPDGQTCTACTNDSHNVQVDGKSCDANCPEHSAANGQKVCECEGGYGPVTGENRCEPSNTNKSSGLSTGAIAGIAVAAVIVVGGLVGFLCWWFLCRGKA

SEQ ID NO: 66 - protein, 2516 aa, Giardia intestinalis
MILFLELIGAALSICIQAAGSDRDTAICAENNCKVLDGQYCAECAIPGEVPINGVCIPLTDPRAVASGCGGSVGAPLSTSARKCELCRDGSYFLHEGGCYNVLYSPGNRICRTATSGYCTLCVDGFFLDTTSSIHQCKPCHSTCATCTSNTAQSCLSCRSDRFLKNNECKECSAADGGVTACAQCSQNSDEITCTLCKEKYFIKEGKCTACADNCATCTGERPEDCSVCVSKYSYDLTAKRCTQTCDEHDSQATKCKTSMCTALNNRYCSQCASSSDLLIDGKCVSADDKKICTPFDPPNGTCSVCAKGHLLFQGGCYSVAEPLGQEVCAETSEVQERTVCVRCAQPGFVPVSGVCLRYDAQEVAAVGCVTSRGSAVTPTDTTCASCGAKAFLYKGGCYSNETSPGNVICDELDGTGGCKVCRNKYYRSGSTCAPCHQSCETCSSGAADSCLSCKKDVYFEVFSGGRGYCKPCNDPVATITIVGVANCERCSPKPSGTMPICTKCTTGHVLKGNSCVQVCHEGAEGAEQCKTGHCNTISNTYCSRCATSAECPVDGICTATLDGHSAQDGACTSCASGYFLYNGGCYRKGVMPGMLICKDEDDSTSTCSKCEDGYMSSGNGCKVCEVSNCRACSGDAASCTSCNSGYFLKDNTKGSKVCEKVCEEGIGPGKCIYGGCTVRDNTFCSRCSEANEVPIDGVCSLGGERARICLNASSGTCLRCAATHLLYYGGCYKITQPVIEICKQDSQIVEKGTAYCKACNDAGEYPVDGSCTAELDGNTCTSSKCTACGSGYFMHRGICMRQESHSDICARVGAGVCEECGKSYFKNPVASTAIDSCIACNDTVGSNGYTGIDHCDTCLPPKAAGPATCTDCADRYILNEQNRCEESCPEVEESSKATGKCLKGYCNVLNGKYCSRCSLESDYLVDGRCTSTNSNVCTPQTQQNDTCASCATTHILYMGGCYNPAAPPGSKACVRHNLIGNTLYCFQCGVVTDLLVDGHCLTPGSTEAAVCTLHRVPTGTCYYCSSDYFLMLGSCVSAERAPGNTVCKDLGVHDGICSTCKDGYYPPPDRSSVSDSCVPCTENSDTLKGIPHCKSCEVSNGLLVCVACEQFYRPMNGGTECVQTCVEAEADPKEHRCRKDKCDVLGTFYCSQCAADAEGPVNGVCASVAAGVCIQYEQANGTCKYCAHGYIKYKGGCYEAGSFEARDICDAQDVVTSGAGSFCAKCKQKDEVPVDGECKVSDDCTVKEDGICKSCKQGVKSFQITKDGSPATVACFTKCPDGMYESAEFCQLCDKSCKTCQDSAAKCTGCADGFYLAAEKCVACSVLHCLTCNAANTCASCQDGYYASGNSCVACTPGCKKCDSTGCKVCKDRFALRNNICIEECPVGLLSTSCAAGYCNVNGTLACSRCALLSSVIIDGKCKANDDACIRTTPSSGTCAACKDTHLLYYGGCYAKGAAAGTAICDSQHQATLGPYTICKQCKQDGEVPIDGSCVALTDTRAIRSQCVAATPSPTSCTRCGPRFFLHAGGCYEIGRSPGTVLCAVAVDSAVAGVCTSCASGYYSTGLLDPTKESCILCNDTGGTNGYTGVDGCTECYPSEAPKRVICTRCKDKHIPSEDGSRCIQSCNDSGSESGNCKAGSCTAMGSLYCSRCALDDEWPINGACTGHDTDYVCEKGKGVCTGCLRGYMLYMGGCYDPAATPGSGICRELLTVGGRTYCKQCNLAGEFPINGLCTKDVPDGVSCSSGLCVICPENYFFHEGGCYDITTTPGSGICEVLGTGREAGTCRRCRPGYRHNKETLTCMSCAVSNCASCEIDVKYCTECIQPYTLTGVGAGAYCTKPCKRVGQDACSWGSCTVMDGSLCSQCASSDYVPIDGICTLYPGEARSLAGPCVKDAKKGRCTACRGSYFLYQGGCYSAGEYPGTGICDERDAAVVDGQVVCGRCLIDGEVPLDGTCAEPKEGLICSKGVCSHCGDGMFLFEGACYTKGRAPGTSICGDTTESTSGCNACEAGFSKTDKGCVRCSDPNCGACVDDPNTCTACRAGYYLQSTSCIACHPACKTCDGMGADRCKECAEGYFGTFATPGLGTCLACSDTSGRDSWVGVSGCRLCEAPKVAGPALCKDCLPGYKALSTGTEVTCHAVCPVAYYEAAGSCIPCAIDNCATCTSTRCTSCVPEHIWNGEECVPKICPPQCLCREQSIACTGCNENAVEVRPTHSSASRCRLADRVGPVVCLACESGRKALTLDGMLLCPRDCPAEGFWTSGRECIPCVPGCLRCTSATTCSACSQGYYSTQSSVSAPSDCRPCDDATSQNGFTGIPHCAVCAADLTRAGVTCHACAEGYGLSGGSCSPCTAAGCARCDGGVCTSCKRGWHLAGDRCLACPPPCAACSSAASCLACADGYFQATLLGGPRDCVPCDQTAPQGLQMAGIHGCGLCQAQAWSGAVLCLRCADGDLPLENYCGGSSVKRSLGPGAITGITLGVAVLVGGAIGLALGLTVCKRGCAGNGSLQPLTI

SEQ ID NO: 67 - protein, 255 aa, Giardia intestinalis
MLLIAFYLVLSTLAVRHTTNHHSEYLRSGSRSNRDTGNRDNAYAAGNCKDGMEEQVGADTVCKQCNAGFVPINGVCTAQGTPSIATAGCKLANNDPPGQDSTVCEQCGTDATYFLYKGGCYDASTGVGQSLCKRASNGACTEAGEGYFAAPNAKATEQSVIPCSDTTGVTLTGDKQYVGVENCATCDAPAGDETVAKCKTCSDRFSLRDNQCVPSSVNKSGLSTGAIAGIAVAAVIVVGGLVGFLCWWFLCRGKA

SEQ ID NO: 68 - protein, 593 aa, Giardia intestinalis
MFYAVLLIGLMLEMAWAAQAGDECEEVTGSEPNTCKTCSAVINGKKYCSQCNDTGNSNSGGAPTDGVCSADNNECSQKQDGKCTQCANKSFMYKGGCYKDSQAPGNTMCETATDGVCTQAKAGYFLPPDADRDNAHQSVIPCGDVEEVLVGNSHKYKGVLHCKVCDAPKAAASDTNPVPATCTTCEDGFFGPTCEACQDENCATCAVTGNNKCSKCKGTGTKTYLKVDSGSTGTCVEASGCTAATFPKVDEQQGNKCAACNSVPDGGIANCATCSLLTQGSRAAPLVTCLTCEQNKYLTPEKNACLDTCPAGMYAVSGDSGNVCTPCHESCASCSTNAKTSCTACYPGYVLSKGDDGATGTCIPECTGRYAENCADGQCTAVVGGSKYCSKCKAGYAPVDGVCVSTTTRAALGCTPGDGVCTACTGSYFLQSGGCYQSTAYPGNTLCSSAQNGQCQTCAANGQSPAGGKCPECSEGCAKCGASNSDVCTECYSGYYRTGTGKCFKCAADSDNGIVGVPNCVSCAPPSNGQGSVICYITRQETDDGTGGDTGGDSMNKSGLSTGAIAGISVAVVVVVGGLVGFLCWWFICRGKA

SEQ ID NO: 69 - protein, 724 aa, Giardia intestinalis
MAYIRMLLLTFYFIVNSFAAPCQQKGYHMVTCKPNSCERVGVIEICVQCRAGGVPINGQCSLFDTSYVAEARCTKSDGTALTSSDTTCGKCGGEYFLFMGGCYGIKYRPGNEICTRADDGKCTTCNTGNSGKYVFKNGDPNAAPGTECILCHDTMGANGYTGVANCAECSHAGTSSGAATCGKCQTEYFKSGDTCTPCGADCWICESTAKCTVCKYGKYIKENGNDRTCVDTSGCGTGNYADIRTNECKPCTDTSVNECATCTYSDTLRKPVCTGCNSGGAKPLLKVDLDGSATCVAEGECASGNTHFLEQSPKACVPCGDAKNGGILGCSTCSSKTTCTKCLDGYYNSGNGGTVTCTACGANCATCSAAGNDQCTKCKPGFFMKQPGSAGKCFACDSKADNGIEGCSQCNSGLTPTCTDCKSNYRKEGTNPVKCTKACEDPTACGGTSGACGAVVVDSAGAFSQYCSLCGDPATFPIDGVCTGDKGGNTCANGVCTRCAAGFFLFMGGCYDVSKAPGSHMCKSAEGGRCTVPGESGRYFIVPGASSTDQSVLTCSNPVGTLTGTGSTAKAYVGVYGCSACTTPVAPSDGGMTAAVCTACNNNNKPNLAGSECLTCTVSGCSHCNRDDMCSACTEGGKRPNIDGSQCIPCNIDGCVRCSEENKCGQCGGDYKLEGEACIFTKPSGGNRSGLNKEAIAGIAVAVIIVVGGLVGFLCWWFIYRGRK

SEQ ID NO: 70 - protein, 587 aa, Giardia intestinalis
MFYAVLLIGLMLEMARAAQAGDECEEVTGSDPNTCKTCSAVINGKKYCSQCNDSGSQSAPTDGKCTADNNECSTKNNGVCTQCAHESFMYKGGCYKKATEPGNTMCETANAGVCTQAKAGYFVPPGADRDNAHQSVIPCGDVEEVLVGNSHKYKGVLHCKVCDAPKAAASDTNPVPATCTTCEDGFFGPTCEACQDENCATCAVTGNNKCSKCKGTGTKTYLKVDGGSTGTCVEASGCTAATFPKVDEQQGNKCAACNSAPDGGIANCATCSLLTQGSRATPLVTCLTCEQNKYLTPEKNACLDACPAGMYANSKVCTPCHESCASCSTNAKTSCTACYPGYVLSKGDDGATGTCIPECTGRYAENCADGQCTAVVGGSKYCSKCKAGYAPVDGICVSTATREVMGCTPGNDGTCTACTGSYFLQSGGCYQSTAYPGNTLCSSAQNGQCQTCAANGQSPAGGKCPECSEGCAKCGASNSDVCTECYSGYYRTGTGKCFKCAADSDNGIVGVPNCVSCAPPTNGQGSVICYITRQETDDGTGGDTGGDSMNKSGLSTGTIAGISVAVIVVVGGLVGFLCWWFVCRGKA

SEQ ID NO: 71 - protein, 515 aa, Giardia intestinalis
MAPNTPTAATCDTCKAGYYKDNGACKKCVTGCIDCTGAGQCTTCEDGKYLKNNQCVDAGQCEATQYADKKTWTCKACDPDITDCTACEYSDATGKPQCTNCNGKLIRTAADGTTTCVDAAGCATVGQDGTHFRSDGDTKCILCGDSSGSGNDQGIADCETCSKEASQKPVCKACFPGFYLSSTCKPCAGNCAKCGSTGNIQDCTECMPGYFLKDAQGTKECVLCSDTTKGGIDGCSVCSNDGNTFKCTECKPNYRPSGEPGDLTCTKTCEDDTACGGTSGACDAIVIDDKGTTKHYCSYCGDSGKVPIDGLCASDKANNNGCANGVCTSCTAANYFLYMGGCYDVSKAPGSHMCKTANNGVCTAVSENNKYFVVPEATNAQQSVLACGNPLGTLVDTKAYVGVDGCSQCTAPAALTGAGMAAAVCTSCDSGKKPNKDGSGCVLCSVSDCKSCVMDNICGECVDGYSLDNGKCVSSGANRSGLSTGAIAGISVAVVVVVGGLIGFLCWWFVCRGKA

SEQ ID NO: 72 - protein, 258 aa, Giardia intestinalis
MLVGFLLVCAVTQASCAAGCQTCNPADQTCTACTDSSHNIQVDGKSCAADCPPNSAPNQKVCECEGGYGPVAGQNRCEQNPSAGCAAGCQTCNPADQTCTACTDSSHNIQVDGKSCAADCPPNSAPNQKVCECEGGYGPVAGQNRCEQNPSAGCAAGCQTCNPADQTCTACTDSSHNIQVDGKSCAADCPPNSAPNQKVCECEGGYGPVAGQNRCISSSVNKSGLSTGAIAGIAVAAVIVVGGLVGFLCWWFLCRGKA

SEQ ID NO: 73 - protein, 425 aa, Giardia intestinalis
MLYLAGLAFAYLALADPKSCTNSQNCASGDNCLDVNMNGSPTEVCTKCEPNNVPIDGACKPAADNTNSCVTSDSGAGGVCASCQGSTYLYKGGCYAACPQGTPNSETNTCDGVPAPDCNLANCEVCSEDKQKCTKCQSNYFLTPEKNACLASCPAGSYAVGQTCAPCDPSCAECSGAGASKCTACPAGKMLRYADESKLNEGGQCVEQCVEGPECETCGLTIGGTKYCSKCKGNNVPLNGVCTSNAARTRFCTTVANGACTVCAAGYFIQEGGCYKTDRLPGKSICTTPTGDGKCQTCANGLTAVSNMCPLCDSTCATCTVANQPDKCSTCPPGRYLDASKACKLCTETSGSIQGVANCASCAPPTGNSGSVICYVKTDGTDNGGSTNKSGLSTGAIAGISVTAVVVVAGLVSFLCWWFLCRGKA

SEQ ID NO: 74 - protein, 524 aa, Giardia intestinalis
MCKQAAGGKCTQAADAKNYFIPPANTDDTHDSVVWCGDEIGVTLSSTQYKGVAKCLVCDAPGGAGAATCTTCEDGYFGATCEKCHESCRTCEAAEENKCKSCTDGYFLGATNGAAGKCLKCNSKTEEGWHGVDNCAKCTSSNTQNTPATCTECVANFYLKPAADATPSSCVTETGCGDGYFPTIVDEVKKCIACSAATNGGIDDCKKCSLKTTSAKAGVEIVCTECNTKWLSPLRDACLDSCPPGTHADSGNICPLCHSTCAECDGNAGANFCTVCYPGFVLKRGETGNMGMCVPECTGEYAENCEADQCTAVIGSSKYCSRCKVGFAPVDGVCVSTASRAVTGCTAGNDGTCTACTGTYFLQSGGCYQSTTYPGNTLCSIAASGKCTTCANGQTADSNLGSCPACPAGCSKCATSGSPKACSECFPGYYKSGDSCARCDTNNSQITGVANCVSCAPPSNGQGSVICYITRQETDDGTGDNTGGSTNKSGLSTGAIAGISVAVIVVVGGLVGFLCWWFICRGKA

SEQ ID NO: 75 - protein, 682 aa, Giardia intestinalis
MLLAIFYFVISTLTAKCTTQTQTCEAEKCEMVGETEICTRCQTGKVPIDGKCVDATANANCKNASGDGDANQVCGKCIGANFFMYKGGCYDKEKVPGNTLCTTVSPDGVCSVAANEYFVPPNADATHDSVVSCSEETPIHLANNKQYIGVAGCATCSAPKAPGEDNTPKAATCTKCAAGFLHTPSEGLSSCEETCPEGYFGHTATAESKKTCKSCTGGSSEAPNVKGIGDCLKCMYNEASGNTLTCEKCSAQKKPSLDKTSCNDCTGQNCAFCSSSGGDCEGCDSGFILDGQNCVKSDCKTENCKACTNPKAANEVCTECISTHHLTPTSQCVQYCQALGNYYAGTNADNKKACKECTVANCKTCNDQGQCQTCNDGFYKNGDACSPCHESCKTCSAGTASDCTECPTGKALKYGNDGTKGTCGEGCTTGQGSGACKTCGLTIDGASYCSECDTQNEYPQNGICTSTTARTVATCKNSNVANGICSSCTNGFLRMNGGCYETTKFPGKSVCEGANADADTCKAPVPGYKVEAGKLVMCSKGCDTCSDATTCTKCGDGYTKIENSQTCTKCDSSCETCTGAATTCKVCATGYYKTALGESTCTSCENDSNGVIGVKGCLNCAPPSSSTGSVLCYLMKGENTGGSVNKSGLSTGAIAGISVAAVVVVAGLVGFLCWWFICRGKA

SEQ ID NO: 76 - protein, 762 aa, Giardia intestinalis
MHLYVDSTLNFLGHTKNSIRMLCLLALEFVVSLVVDAYQNAFEKECTTVAQKDTCATKKCITVSGTELCRECVGGKVPIDGICKDTTDSSVSLYGCEHSSGTGFCTSCKDTAFLFYGSCYAIDKVPGNLVCSKAESGKCTECRQGSKFLFTNPDDSAAERCILCYDNVGFGSYKGVDGCRYCLPPLTGETSAECNWCQNEKYGPIDGVCKDPGRHLCADGACSNCYMTHIQHNGGCYTKTETVAQKICTTENQFQVINITACKKCAIKGEVPMDGRCIKGLLEPKCNPYPNTDGSCTDCKKGGVSYDTFLFNEGCYNMSDYIGSQICSKVNENAECELWNIGSYAVFRPPNDKTAHTCSDTSARGIPGCSRCSYNVEKKGPICYNCEYNTLAFDRMSCITETSCTGDNVQRKCPGNSERGCRCECAEKSYKNGDKCVACDSSCLKCAGRESRSCTLCPPGKALKYIGSSMVGTCEEGCKQDDTCETCGLTVNQTAYCSKCKDPTKYPLDGVCTSASEARTSACLQQSNGACQKCSSDYFLMGGGCYQINKYPGRFVCGWADDGKCIETMNGYSINDQGQLVDCDSTCMTCVEGKKEQCLSCHSSKYLKKEGTTSYGTCVSRNDCKDGYYANHDTMECLPCNINDCVSCHLIDKSILCSRCRGDNLVGLDKRSCTTVIPENAVESWGGYTCNDDSVLSGNACLRKSSQKNKGNGLSNNVIIGICVGAVLIMGALIGVLAWWVVSRKKKSASFERSRSLVISKS

SEQ ID NO: 77 - protein, 641 aa, Giardia intestinalis
MLYSDSDSAMWCGGDSDSMRLLFMGGCYNKDAHPGSEICTAASNGVCTECNTANGLFKNPVTPSEKGSECILCSDTIDRNGVMGVAGCSECSHTGTSGPATCTECQAGFVTKDSACVKCGEGCSACSADTPTQCTACVEGKFLKADKCVDANQCDNGKYADPKTGQCKACTDTSVNECATCAYSDTLQKPVCTGCNSGGNLLLKVNPDGSATCVAEAECTSGNTHFLEQSPKACVPCGDTKNGGILGCDTCSSKTTCTKCLDGYYNSASGNTATCTACGENCATCAKDTKDQCTTCKQGYFLKDSSSGECISCSDTANGGRDGCSACSNSGGFKCTDCKPNYKKQLNGDAGDDYTCTKTCEDETACGGTAGACDAIVVGNDGSMLSYCSKCVGAGYGPINGKCTNALAGNTCADGVCTRCTNNYFLYMGGCYKATEVPGSLMCSEATTAGVCTTPNANDRYFVVPEAKATDQSVLACGNPLGTLVDPQGTAKAYVGVDGCSQCTAPAALSDGGMAAAICTSCDSDRKPNRDGSGCFACAVSGCSHCNRDDMCEACNDGKKVSPGRKSCVDKCPSNSTDTDSVCVCDDGYSPDSSGTSCVSMSTNRSGLSAGAIAGIAVAVVVVVGGLVGFLCWWFICRGKA

SEQ ID NO: 78 - protein, 340 aa, Giardia intestinalis
MKGSGPTGECLPCDNAQEGIDGCAECTGPAGSLKCTKCKPNRKPVGTSDNYTCTEKTCEDETACGGTSGACNAIVIDTDGNTKHYCSYCGDSSKYPIDGLCASEAQSNTCNNHVCESCTTGYFLYMNGCYDVSKPPGNLMCSKATTAGVCTEAANNKYFVVPEAKATDQSVLACGNPLGTLIGTQGTAKAYVGVDGCSQCTAPAAPSDGGMTPAVCTSCDNSKKPNLAGSGCFPCAVVGCSHCDMDNKCSACTEGGKRPNKEGTACFECNVEGCAYCSGANKCEECSDGFKLEGDKCVSSGTNRSGLSTGAIAGISVAVVVVVGGLVGFLCWWFVCRGKA

SEQ ID NO: 79 - protein, 887 aa, Giardia intestinalis
MTCKASGIVDCTTCEYNPATGGPKCTACNGAKIVKEEADGTTTCIDAGTCTQSGATGENFLSDGDAECILCSNDSSKTDNNKGSPGCGTCSKNGAKPECKTCLDGYYDSGNGNPAVCVACAGDCGKCGPGGAIDTCEKCKPGFFLKNDGTKKCVPCDDPTDGVPGCATCTLSGSFTCDSCKVNYQKKVGAGGAVTCVKTCEDPTACGGTAGACDAMIIDDQGNTKHYCSYCGETNKIPIDGKCVDSGSINGNTCNSHTCTSCAANYFLYMGGCYKATEVPGSLMCKTADNGVCTAANANNKYFVVPGATNQNQSVLACGNPLGTLVGTQGTAKAYVGVDGCSQCTAPAAPSDGGMTAAICTSCDNSKKPNRDGSGCVLCPVSDCKSCVVDNICEECVDGLYFKAGETPSCVSAEACTNEEGFFIDATEKKCTACADDNCAVCAAKEQQKCSRCKTSGTKKYLMKDGESTTGTCVDTAGCPATHYVDEEAKECNTCVSGGTVDCTTCEKGANGVVCKTCTTDTKTIFGLNRKSCVASCPANSTPKATGQGSQMCECNEGLQPNTESTECQPISNCNTEHCLECTGEGADKEVCTKCLSEYYLTPTSQCVSDCTTLKGYYGNDTDRKCKKCNDACVECKGEGADKCTACPAGRMLQYTDADTPANGGTCMNQCSVSPANDGCAECGAQIGGTAYCSKCKNTQQAPLDGNCAANTRTRFCTTVSNGACTQCENNYFLKDGGCYQTDRQPGKQVCTTVQGGKCTKCASGLTADNGDCSNKRCHLSCETCTAANDANACATCSTGYYKPQSAGTKCNPCSEGLAGCRQCTVSSTGAFMCLVMGDGTGDNTGGSVNRGGLSTGAIAGISVAVIVVVGGLVGFLCWWFICRGKA

SEQ ID NO: 80 - protein, 650 aa, Giardia intestinalis
MIVLCGVLCSVGDSDSVGLLFMGGCYKTESQPGSEICTAAKDGVCTACKADNGLFKNPAAPQKPGSECILCHDATGADGYTGVENCAQCTKSDSNKGAATCTECQDGYYKNAQTCTKCNDACLTCDGSGQNACTSCPEGKYLKGDNTCVDANQCGADKYADKKTWTCKACDPDITGCTACAYEDATGGPVCSTCGSPNSLVKTASDGTTTCVDANGCKEGGMHFVDDGNTKCILCSDTNGGSPNDQGKDNCKKCTKANSGQPPECSACLDGYFFDNSAKTCTNKCAPNCAMCSEATTENKCLTCKEGFFLKVSGTPGQCFACDSVENGGIDGCAECTNSGTFKCTKCKVNYRPSGDSSTGVTCTKICEDETACGGTSGACDAMIIDDQGNTKNYCSYCGDSTKVPIDGLCVSTGSNANGNTCTSHTCTSCAQGYFLYMGGCYSVLTQPGKSMCKTSSKEGICTEAASNKYFLVPEATNAQQSVLACSNPLGTLIGTQDKAKAYVGVDGCSQCTAPTPLTGAGMAPAVCTACSGTNKPNLAGSGCFACAVEGCSHCNRDNMCEKCDNNKKVSPGRKSCVDGCPSNSTDTDSVCVCNDGYSPDDAGASCVSSGANRSGLSTGAIAGISVAVVAVVGGLVGFLCWWFVCRGKA

SEQ ID NO: 81 - protein, 181 aa, Giardia intestinalis
MNGCYDVSKPPGNLMCSKATTAGVCTEAANNKYFVVPEAKATDQSVLACGNPLGTLIGTQGTAKAYVGVDGCSQCTAPTQLEAPGMTSAVCTACDSGRKPNRDGSGCVVCSDTNCKSCVMDGVCGECNSGFSLDNGKCVSSGANRSGLSTGAIAGISVAVVAVVGGLVGFLCWWFVCRGKA

SEQ ID NO: 82 - protein, 662 aa, Giardia intestinalis
MLYSDSDSAMWCGGDSGGVGLLFMGGCYKTESQPGSEICTAAKDGLCTTCNTANGLFKNPATAPKSGSECILCWDTVGDGATKGVEGCATCTAPANNKGAATCTKCQDGYYKNAQTCVKCNEACLTCDGSGQNACTSCPEGKYLKTDSKTCVEASACAKGTYADEATRKCESCTAGSGAGGTAGVQECAACAYNKASGKLECSECTGGAKIPRVSLDGTSTCVAKDYAGCAGQDNALFIVEDKSKCLLCDDVETGTDPKDQGVAGCKACTKTSSAKPTCTECLEGYKSTGVGSVTCTPCHANCATCSAETAEDKCLTCKAGFFLVDVTGGKKCVPCDSKTDNGIDGCAECDNSTGSLKCTKCKVNYKQSGTGPVTCTKTCEDETACGGTSGACDAIVIDDKGNTKHYCSYCGDDSKVPIDGKCVDSGSINGNTCAKGVCTQCAQGYFLYMGGCYKVASPPGNLMCTEATTAGVCTEAANNKYFVVPGASNQNQSVLACGNPLGTLVGTQGTAKAYVGVLNCSQCTAPAALSDGGMAAAICTSCDSDRKPNRDGSGCFACAVSGCSHCNRDDMCEACNDGKKVSPGRKSCVDKCPSNSTDTDSVCVCDDGYSPDSSGTSCVSMSTNRSGLSTGAIAGISVAVIAVVGGLIGFLCWWFLCRGKA

SEQ ID NO: 83 - protein, 589 aa, Giardia intestinalis
MGGCYKVGQDPGNEICTAADKGVCTTCKAGAAYLFQNPASPVAPGNECILCSDTTQRDGVMGVDNCAQCQAPQSAGAATCSTCQDGYFLSDKLCKPCNQNCATCTGAGATNCETCKPGTYLKSDNSCSNTCENNQYADELTMTCKACSEIHADCTACSFDKTTGKPKCTNCGTNKTPRTALDGTSTCVDKTLDGCKGADGALFMKEDKTCALCGDASPDAGVNDKGIAGCSICEKTAGNPPTCSKCLEGYIENTNGGGFACDPCAPGCATCSKKEDPSKCLTCKQGYFLKDSSSGECISCSDTTKGGIEGCAECTNSGTFKCTKCKVNYRPSGEPSTGVTCTKVCEDPTACGGTSGACDAIVIDNTGKELHYCSYCGKDSEFPIDGLCASEAKGNTGCVNNVCTSCTMGYFLYMGGCYSISAQPGKSMCTKAGDGVCTEAAAGYFIPPSPTKDKQSVLSCGNPLGVELAGQKAYVGVDGCSQCTAPTAPSDAGMTPAVCTSCDSDRKPNKDGSGCVTCSVGDCKSCVMDDVCGECSDGYSLEGGKCVSSGANRSGLSTGAIAGISVAVVVVVGGLVGFLCWWFLCRGKA

SEQ ID NO: 84 - protein, 2259 aa, Giardia intestinalis
MCPRFRWPLCSIEFRDMKQDPVRLLMQTRAVLCQLLASMLVGIGLIFAVALADACSPSIDGCAECDSTGKKCTKCDANGNTPYLKKTNPSDPTGTCVSAVDCQGSAGYYTDDSVSDAKECKKCNAPCTACAGTADKCTKCDANGAAPYLKKTNPSDPTGTCVSAVDCQGSAGYYTDDSVSDAKECKKCNAPCTACAGTADKCTKCDANGAAPYLKKTNPSDPTGTCVSAVDCQGSAGYYTDDSVSDAKECKKCNAPCTACAGTADKCTKCDANGAAPYLKKTNPSDPTGTCVSAVDCQGSAGYYTDDSVSDAKECKKCNAPCTACAGTADKCTKCDANGAAPYLKKTNPSDPTGTCVSAVDCQGSAGYYTDDSVSDAKECKKCNAPCTACAGTADKCTKCDANGAAPYLKKTNPSDPTGTCVSAVDCQGSAGYYTDDSVSDAKECKKCNAPCTACAGTADKCTKCDANGAAPYLKKTNPSDPTGTCVSAVDCQGSAGYYTDDSVSDAKECKKCNAPCTACAGTADKCTKCDANGAAPYLKKTNPSDPTGTCVSAVDCQGSAGYYTDDSVSDAKECKKCNAPCTACAGTADKCTKCDANGAAPYLKKTNPSDPTGTCVSAVDCQGSAGYYTDDSVSDAKECKKCNAPCTACAGTADKCTKCDANGAAPYLKKTNPSDPTGTCVSAVDCQGSAGYYTDDSVSDAKECKKCNAPCTACAGTADKCTKCDANGAAPYLKKTNPSDPTGTCVSAVDCQGSAGYYTDDSVSDAKECKKCNAPCTACAGTADKCTKCDANGAAPYLKKTNPSDPTGTCVSAVDCQGSAGYYTDDSVSDAKECKKCNAPCTACAGTADKCTKCDANGAAPYLKKTNPSDPTGTCVSAVDCQGSAGYYTDDSVSDAKECKKCNAPCTACAGTADKCTKCDANGAAPYLKKTNPSDPTGTCVSAVDCQGSAGYYTDDSVSDAKECKKCNAPCTACAGTADKCTKCDANGAAPYLKKTNPSDPTGTCVSAVDCQGSAGYYTDDSVSDAKECKKCNAPCTACAGTADKCTKCDANGAAPYLKKTNPSDPTGTCVSAVDCQGSAGYYTDDSVSDAKECKKCNAPCTACAGTADKCTKCDANGAAPYLKKTNPSDPTGTCVSAVDCQGSAGYYTDDSVSDAKECKKCNAPCTACAGTADKCTKCDANGAAPYLKKTNPSDPTGTCVSAVDCQGSAGYYTDDSVSDAKECKKCNAPCTACAGTADKCTKCDANGAAPYLKKTNPSDPTGTCVSAVDCQGSAGYYTDDSVSDAKECKKCNAPCTACAGTADKCTKCDANGAAPYLKKTNPSDPTGTCVSAVDCQGSAGYYTDDSVSDAKECKKCNAPCTACAGTADKCTKCDANGAAPYLKKTNPSDPTGTCVSAVDCQGSAGYYTDDSVSDAKECKKCNAPCTACAGTADKCTKCDANGAAPYLKKTNPSDPTGTCVSAVDCQGSAGYYTDDSVSDAKECKKCNAPCTACAGTADKCTKCDANGAAPYLKKTNPSDPTGTCVSAVDCQGSAGYYTDDSVSDAKECKKCNAPCTACAGTADKCTKCDANGAAPYLKKTNPSDPTGTCVSAVDCQGSAGYYTDDSVSDAKECKKCNAPCTACAGTADKCTKCDANGAAPYLKKTNPSDPTGTCVSAVDCQGSAGYYTDDSVSDAKECKKCNAPCTACAGTADKCTKCDANGAAPYLKKTNPSDPTGTCVSAVDCQGSAGYYTDDSVSDAKECKKCNAPCTACAGTADKCTKCDANGAAPYLKKTNPSDPTGTCVSAVDCQGSAGYYTDDSVSDAKECKKCAEGQKPNTAGTQCFSCSDANCERCDQNDVCARCSTGAPPENGKCPAATPGCHSSCDGCTENAMTNQADKCTGCKEGRYLKPESAAGQSGACLTAEECTSDKTHFTREKAGDSKGMCLSCSDATHGITGCKKCALKTLSGEAESTVVCSECTDKRLTPSGNACLDNCPAGTYADNINGVSVCASCHATCAECNGDANAASCTACYPGYSLLYGSGTAGTCVKECTGAFITNCADGQCTANVGGAKYCAQCKDGYAPIDGICTTVAAAGRDASVCTAADGKCTKCAGEYTLMSGGCYGVAKLPGKSVCTLASNGKCTMCAANNQAPVQEKCPECSEGCAKCNDSNACTECLPGYYKGAGDKCFKCTASSGNNNQITGVANCVSCAPPAGGNGGPVTCYIKTDGDNTGGSVNKSGLSTGAIAGISVAVVVVVGGLVGFLCWWFICRGKA

SEQ ID NO: 85 - protein, 593 aa, Giardia intestinalis
MGGCYNKDAHPGSDICTQAEGGLCTECNTKNGLFKNPAAAPKPGNECILCWDTVGDGATKGVENCATCTAPGNAGVATCDTCQDGYYKDSLVCMQCDQSCLTCDGSGPNQCTSCKEGKYLKGTECVDKGTCKTDYYPDDTSMTCVACSTIQDCTACTMDQSTGKPKCTNCGSQKIPRTTLDGTSTCVENSYAGCQGTDKELFMKEDQPECLLCGDATTGTDPKDKGVANCRTCTKASATGAAPVCETCKEGYIKNGNGAGATCEACHQNCATCSEATTENKCLTCKEGFFLAGTGEGKCISCENGNDSGYSGLAGCLSCTAPAAPGPASCNRCKIGYTLQGTTCVKTCEDETACGGTSGACDAIVIGANGKELHYCSYCGEANKYPINGVCVSTGNENGNTCAKGVCTQCTTGYFMYMGGCYKVTEVPGKSMCTKAGDGVCTEAAAGYFIPPSPTKDKQSVLACSNPLGVELAGQKAYVGVDGCSQCTAPTAPSDAGMTPAVCTSCDSDRKPNKDGSGCVLCSVGGCKSCVMDDVCGECSDGYSLEGGKCVSSGANRSGLSTGAIAGISVAVVAVVGGLVGFLCWWFLCRGKA

SEQ ID NO: 86 - protein, 593 aa, Giardia intestinalis
MGGCYNKDAHPGSDICTQAEGGLCTECNTKNGLFKNPAAAPKPGNECILCWDTVGDGATKGVENCATCTAPGNAGVATCDTCQDGYYKDSLVCMQCDQSCLTCDGSGPNQCTSCKEGKYLKGTECVDKGTCKTDYYPDDTSMTCVACSTIQDCTACTMDQSTGKPKCTNCGSQKIPRTTLDGTSTCVENSYAGCQGTDKELFMKEDQPECLLCGDATTGTDPKDKGVANCRTCTKASATGAAPVCETCKEGYIKNGNGAGATCEACHQNCATCSEATTENKCLTCKEGFFLAGTGEGKCISCENGNDSGYSGLAGCLSCTAPAAPGPASCNRCKIGYTLQGTTCVKTCEDETACGGTSGACDAIVIGANGKELHYCSYCGEANKYPINGVCVSTGNENGNTCAKGVCTQCTTGYFMYMGGCYKVTEVPGKSMCTKAGDGVCTEAAAGYFIPPSPTKDKQSVLACSNPLGVELAGQKAYVGVDGCSQCTAPTAPSDAGMTPAVCTSCDSDRKPNKDGSGCVLCSVSDCKSCVVDDVCGECVDGYSLDNGKCVSMSTNRSGLSTGAIAGISVAVVVVVGGLVGFLCWWFLCRGKA

SEQ ID NO: 87 - protein, 170 aa, Giardia intestinalis
MCSKATTAGVCTTPNANNRYFIVPEAKATDQSVLACGNPLGTLIGTQDKAKAYVGVDGCSQCTAPTQLEAPGMTSAVCTACDSGRKPNKDGSGCVLCSVGDCKSCVMDDVCGECNSGFSLDSSGASCVSSGANRSGLSTGAIAGISVAVIVVVGGLVGFLCWWFLCRGKA

SEQ ID NO: 88 - protein, 370 aa, Giardia intestinalis
MLLPALCFLMSGLAAQRTKQPTSGCQVDNCERCVPSDETKCEACNSGFDLDENTKQCNPAPAECPIVNCQTCSQDKQTCVACEPGKHLTPTKKACLDACPVGTYLSGQTCAPCDPSCAECSGAGASKCTACPAGKMLRYTDETKLNEGGQCVEQCVEGPECETCGLTIGGTKYCSKCKGSNVPLNGVCTSNAARTQFCTTAADGACTACAAGYFIQEGGCYQTTRLPGKSICTTDNGGKCQTCANGQTPDGGTGVCPLCDSTCKTCTAGQTQQCQTCFSGYYKSGTKCVKCDASDGQITGVTDCVSCAPPSGDSGSVTCYVKMDGSSGGNSTNKSGLSTGAIAGIAVAAVIVVGGLVGFLCWWFICRGKA

SEQ ID NO: 89 - protein, 708 aa, Giardia intestinalis
MLLIALHLVTSILAAPCQPDGDHAASCQTDKCETVGYSEICTECRAGGVPVGGFCWPPGTPQAAAAGCTRADGTALAGSDTICGKCGDGYFLFMGGCYKTSQWSEICTAADKGVCTTCKAGAAYLFQNPASPVAPGNECVLCSDVAPRDGVTGVAGCYTCTAPGGGTGAATCTACQGGYAKKGDACVQCGPGCLTCESATPTQCTACPKGKFLKGTECVEASGCGSDSYADPKVDKCKACATDIADCATCEYNATISQPQCKTCSSSKIVKTAADGTTTCVAEGECTSTHFIDQTPPKACVLCGDDARGGVAGCSSCPGKDQCSACLAGYIKKGSGNSVTCDPCGENCATCTQAGNDKCDTCKPGYFLKQPGSAGKCFACDSKADNGIEGCSQCNSGLTPTCTDCKSNYRKEGTNPVKCTKVCEDPTACGGTSGACGAVVVDSAGAFSQYCSLCGDPATFPIDGVCTGTKGDNTCENGVCTRCAAGFFLYMGGCYDVSKAPGSHMCKTAEGGRCTAPSENGRYFLVPGASNTDQSVLACENPLGTVIGAGSTAKAYVGVYGCTACTAPAALEAPGMTPATCTACSGNNKPNLAGSGCFTCTVDGCSHCGAGGKCEACTSKDQRPNTDGSQCIACSIDGCVRCSEENKCGRCGDDYRLEGEACVSTKPSGGNRSGLSTGAIAGISVAVVVVVAGLVGFLCWWFICRGKA

SEQ ID NO: 90 - protein, 615 aa, Giardia intestinalis
MGGCYKTSQWSEICTAADKGVCTTCKAGAAYLFQNPASPVAPGNECVLCSDVAPRDGVTGVAGCYTCTAPGGGTGAATCTACQGGYAKKGDACVQCGPGCLTCESATPTQCTACPKGKFLKGTECVEASGCGSDSYADPKVDKCKACATDIADCATCEYNATISQPQCKTCSSSKIVKTAADGTTTCVAEGECTSTHFIDQTPPKACVLCGDDARGGVAGCSSCPGKDQCSACLAGYIKKGSGNSVTCDPCGENCATCTQAGNDKCDTCKPGYFLKQPGSAGKCFACDSKADNGIEGCSQCNSGLTPTCTDCKSNYRKEGTNPVKCTKVCEDPTACGGTSGACGAVVVDSAGAFSQYCSLCGDPATFPIDGVCTGTKGDNTCENGVCTRCAAGFFLYMGGCYDVSKAPGSHMCKTAEGGRCTAPSENGRYFLVPGASNTDQSVLACENPLGTVIGAGSTAKAYVGVYGCTACTAPAALEAPGMTPATCTACSGNNKPNLAGSGCFTCTVDGCSHCGAGGKCEACTSKDQRPNTDGSQCIACSIDGCVRCSEENKCGRCGDDYRLEGEACVSTKPSGGNRSGLSTGAIAGISVAVVVVVAGLVGFLCWWFICRGKA

SEQ ID NO: 91 - protein, 807 aa, Giardia intestinalis
MILASLIVILTCFLAGSFSEETFVYYNGFGYSCEGRIPQCLQDRCLVDLTTFFCTECSQDYVPINGTCVATTDEKVNKAGCVKSPKGGWCTGCNNGYFLFYGGCYELSGRWKASICDRAENGICQECGKGGGYYTPITFTNPNATSPERCIYCGDIVGFGGSSGVYRCQYCNQHRLPGNTIPSCSECSERVMCPFDFRCKPASSTAVFGYCYVCPRGYVWSQFGCYTADSIIGNSICLPRNTIDIQGRSLCTQCANSSEAPQNGLCKSISEFGNVCTKDPRTGKCTSCKNDSSGQYFLFYGGCYLFNNAPNQIESYICQAMQGNVCTTCNSSTKEVFTKNSRCWRCGDSANGGIEGCQRCEMKDSGLQCLECRDLYLSLDKRSCLASCPKGQKGVQESSSSVHSCACDDGSYLKDGKCVGCAVENCAECDESSCKKCKYGYTLSSSQCVATKCKDPNCDTCEDRDVCTKCTDGNSLDPHGLCVKDCLGSAGYYKATVGGVSRCVACTLGNCVVCESESKCKTCRDGFYVEGSGGCKPCSSECATCSGPASGDCTSCPARKRLQYSDGAKGSCVPQCVKDSSCAECGLTVSGTSYCSRCAKSTEYPNNGVCTSSSSRAAGTACVNVADGRCALCSSNSFSLNGGCYTSTLLPGKTVCTKENNGWCDSIVAGYGITYNGTLLTCPTNCAMCSSGVCNACNSGFYLEKGACKACSKGCATCPHGKACFDCLTGYYFSENTCKACHKAISKCSLCVVPEGAATPICLEYDNTSKKSALSSSAISGIAIGVVLVVGGVAAVLVWFFVFRKKN

SEQ ID NO: 92 - protein, 937 aa, Giardia intestinalis
MSWSSLFALLIIAMHAHDEVCARCLHDKCLQTRHGSVCTHCETGYVPLEGRCTATDVSFCLVESEGGGTCSQCAYGYRGLLNGCYPVPLFGVLDGNVSAASAFYISTHVLLNGQILFTGCFANNELPINGVCAEDTDNWCAQSGETDFSYGTSCLRCTGTNVFYFKGGCYNTKTEPGSLICKAALDGVCTACNTDSGYVFENPSTGTKTDQCISCGDGYGADGYSGVESCKTCVAPSGNSKIATCSACPDGYKFNIAHTRCFNCALQGCLNCDGYDSCEHCDTGFFMADQSYSKICVTTCPSGTFPFVNSTGYNKCFSCSSSDGSDSIAVERIPGCETCAVGSGNLLTCSACLQGYQLTPTGCKQVCADVLGCGLDACTVVIGSMSYCSKCKSTNNYAPINGVCEYVSMNDKSGCRREETIAGVCPQCGEGYFLHMNGCYKADQAPGNLVCSSVGTGSRSLRNAGAGLCSVCGSGYRAKHGRCISCNKQHCLEYIPNTCVCTLCEDNVLLIQGECVSFPSSGCKVPYCALCEKKLEVCTRCEASYYITPLHGCTKDCEDLMGYHNNADLGKCVRCRIRNCYKCYDSARCSECSTGYGLTDNQQCVRCPKNCFACAHHNKCTTCKSGYILSDSEVCESEDEYKVDCKHADAKYIKYEFARHIKGSVRQRLTASMCSECNAGKVPINGKCVSVSAKAPSCTPGTGENAGKCTRCISSGSSNSTFLYSGGCYDSNTNVGKSLCASVGDNGLCARCPRGGFMLDTSRNECVPCPMNCMKCNSSGCLRCDSGWLLIESECVPCKKGCLECGSSSDKCTSCITGYYVAGATTSSGKEGICRRCDDTQEVDGWKGIQGCTLCTPPVFAGEVLCLSKEVIEDVVTRSLSSGVVAGISITIVVVVAAIVGVLVWKYVCKKKSSKRIKMVDMDVSINTSQYMSTSTV

SEQ ID NO: 93 - protein, 454 aa, Giardia intestinalis
MQMSRKFLLAIFILQLAWAVQVEDEREEAASDNVSTSGIYSFTIEDKRYCPQCNHSEDNPDSISREHVVNNTINSKEAEEEPTKCGENLYLKVDSGTTSCVAGEDCGTGSFPGTDSAGNRKCISCSDSANGGIQHCSECSLLAPTSRSVTVLITCSKCSANNLSPLGDKCLRKCPFGTYDNGDNVCARCHESCASCNNSPEPTSCTSCYPGFVLDHAGGPAGTCIPECTGRYAENCEAGQCTAVVGTSKYCSKCKTGYVPVDGICVSTATREVMGCTPGNDGTCTACTGTYFLQSGGCYQSTAYPGMRLCEQAQDGKCTKCANLQAVDKQGSCPLCETGCDLCGTSRTTACQACFPGYYHSGTKCFKCTDDSDESGVKITGAPNCVSCEPPNPGKSGPVTCYVTQQPNNDNTGWSMNSNALSPGAITGISITVILIIGGVAGFLCWWFFCHKKK

SEQ ID NO: 94 - protein, 734 aa, Giardia intestinalis
MFGSFVLAGVLVQIALAEKVTERARQAECADKTNDCEICDVLIDGKLYCSRCNTGFVPINGKCADKEGAKANCKGADGGDTADRTCAQCAEQTFMYKGSCYQTSQAPGSSMCKTAADGKCTEALESKAYFVPPGADKTHDSVVSCGDATGVTLADKTYKGVDGCTACDAPAPADASGAKVATCTACQADKYLKTATDPATSCVTEKECTDAPGFFVDTTDGKKCSKCAETCKTCKTEAAKCTSCNGDKPYLKKDGESTTGTCVDAKGCPETHYVDEGAKECNTCVSAGTTDCTTCEKGPTGVVCKTCTSGTKTKFGLGKKSCVENCPSNSNDEKTAGTCECVDGYVLNGAGTGCTKKPDPQCNTPGCKTCSEPKTSKEVCTECEGPKALTPTGQCIDNCGDLGGYYAGTNEGGKKACKKCEVENCLLCNLQGQCDTCKDGYYKSGAACAKCDTSCKTCANGNSNGCTSCEPKKALSYEGEGNTGTCKSECKPGTNNCEKCELTVDGTAYCSKCKDANQFPQNGVCSAAAGKAITCTTQGGGVCNKCANGLLRMNGGCYETTKLPGKNVCEEVTQDGDTCKTEAPGYHLNNNDLVTCSPGCKTCTSNTVCTTCMYGYVKTDNKCTKCATGCATCAGSASNCDICSTGYYKSGTTCVSCTANTADSTITGVANCASCAPPLNDKGSVLCYLVQSGENTNKGGLSTGAIAGIAVAVIIVVGGLVGFLCWWFMCRGKA

SEQ ID NO: 95 - protein, 2076 aa, Giardia intestinalis
MLFAALAVLFSSASSPGCIDPTQNPDGEYECQHGGVCTRFETLLSSGFICDCPRGSFGRACNFCDRSFMLINDRCVSPACVLDGVSVCGGSGECLYTEDTDSWSCSCRDGFVNIAGTCVSSSCINPESPDLICSGNGSCRSLPGGETGDDYLCDCNDLHLGDHCEACNRRTSKPVTTNGVTECVSLECFTEDEELPCGGHGHCGSYPVDGKLSYTCMCGFGYSLVNKTCVASSCIFEYSNGHHVCGYDDSFKTACVESAQGEWSCRCPSDTTFMDGYGCVSSQCIENSGEPPCGGVGGCYVFQISGETKTYKCQCPHYTVGNFCKTCSPNEATNIDGVCVPNDCIYGNTSCNDHGVCHSLLVHSFCECESEFDTVDEMKHYCGIPECHDPNTKMLCSGAGACNEQTRVCVCINGFQYQSYGGCVPDKLINENGVCNGRGTASLKDPWDLPANEKLNATNPEHWICVCGTLYTGETCDQCNPSTSFTPTASPPESQPTGAPPQLPTCTPRDCYNDGYELKDPDPPVDPNQPSDPTYIDQPTKLCTNPLQENNSPLGTCESYKIEDEDMFICTSNDPNQYQQAYNSSSIYPVACTTPGQHYVRQNFMCGLLQGKTAPLEIRMVSCSTTETNGYNCTCNGEYNWVSRTINGVIHYSCMHDECLNDGATSGSSDINDYCSGLGDCILDLTGTTHTCACSANAVFYKNKCIPRACVSGWKDEQTPIICGGRGTCTHWGDGDWGCKCMDVDHYTYVSGGCYPNSCVYLWQNPTDGASYIQLCGGDSVVAGGTCIVDEADPSKSYCECNADFVRYGQTCVHKKCTSVDYHNDFQVTPDSICSGNGYCLFNSRTNMSTCFCTKGTAYGPFCSVEPCITNIEYEFGDTWGEITLNCGRPGAGVCNITGESTGECSCNPDYELLPPTSEHPELAKICVNTGCIDNGVYCGGDLAAVCGISRAVATCLCSQAFEAVNNTCVPKMCYAPNPDGMMAVCGGVGTCEKESGSNVYSCKCPTSGYTAAQMKYNGNTVWTCAPQSCVNGTDSSATVCGGTTGGSCVGSGGQYRCSCSDGFFLITPTQCVSNNCLSQNMNGQISVCSGVGTCSESTMGMFTEYYCTGCTTGFKAIDGKCVSESCYFQIDSLSKYYVCGKLGNFGECVGTGSGFTCSCSYGFFLAEKYCVPNQCTDNRRHPAECGGHGECKLKSLAEFTCVCNANYETVDTDELGLHYCVAQACMVKDNGVVTSICNGHGLCRKDRCSCYEGYADDPSASTNDPTGNCTVCATGYKEYPAPNTLTAIAANANCVKNNCGRSTQDDDCGGSTVANNPSCVYSSKTSTYECSCKTGHYSNNGICKVSSCTDGDSTVECGGSQFGTCDNTNNICTCVSGMVLVKPYLCVSPRCISNSATNEVCNGHGTCAINPRTQIAACRCTDDYVTARDGLCYLSTCFNDPEHSQPVVCDGADNSCNTGGECSCTPPFVKFAGQNGCVHSNCIQNGVVCGGRGVCRANLLYTQYSCFCNDEYILASDGTCQPRSCSRDGVTVCDNNGTCEADASGSTYSCKCNGTTILYMNGCVPRACFPQYNPRASLCGGNGLCDMSSGMCQCNSDASLTDELLCQPTDCVNPQYSATVCTNNGVCNSVSNVCLCVEGSSGKYCESCASGYKKYTSNDEYNGRCVKDSCGSKNCGTPGKCIFDSDIIEYRCLCNDGFYYSTSEQECRRCLMDNCVTCNGESSCAVCEDGYYSNGGRCRECDDDCRTCSGPEESHCLSCMPGKVHSTGVGPANCIDECKENEDGCATCGSVIAGSRYCSVCRGQTSFPLEGTCHAKTSRAGDACESVVAGRCTRCLGNYFLYEGGCYSSSRLPGSQVCSVVLGGNCLKCADGYYKAGSDVEHACVSCDGLMEGCTKCMASGCTECKAGYYPDTSNGRCMECASPCKTCNGAGGRCTSCAKGYFAQFMADDLNNYGECRNCSNTTADNGLVGVRNCKECVVFAVGSLSQPEMVHCSEFSSVKSSAGVIAGSVIAVLLVLGGVIGFCVWWFLVRGKKGQAAQKGRRGKSYSGRKYVRTVSDPDSTSLLSTDMTNSLL

SEQ ID NO: 96 - protein, 96 aa, Giardia intestinalis
MTAAVCTSCDSGKKPNKDGSGCVVCSDTNCKSCVVDGVCGECNSGFSLDNGKCVSMSTNKSGLSTGAIAGISVAAVVVVGGLVGFLCWWFVCRGKA

SEQ ID NO: 97 - protein, 2169 aa, Giardia intestinalis
MLTGLVLSLALASLELRASAASTITTAAEFSAIRDNLAGSYILGADITLDPSYEPISGFTGTLDGANYKLTISGQTGSSGVFGDQFSGSVRNLRLNYAATMSSPLTNPVGALIGVTTGSATVESVFVEGTMTLSGTGDATITVGGVIGSATETTTLRNITSTVSIACTGGSHSIGGVVGTSSVGCAKCFFGGSISATAAEASVIGGVFGTAGGVSLTNSAMYKGSLSATSVSTSQASALGALVGNITAADFTLCECYAEFTSLSLTSSSVAYLGGLIGSFSSATSKDTVTISDSYVNGGTQTLTATGSFSTSAGLLGYSASGKVTVRSSYVNLTKFAMSGSSQINATLSVGTANTNTGLTLENCHLKAQTVGLSGGTSKSSFAPIANVVNVQAKGISILEVESRLGALVLTDFKGLVSLVVGRFVTTTGGKMQDCFASLDSCTLGSSSSKVALFYTYTAANAVSSYIIANVTCAEITKAFSSQKSDAGISHNYFNSNAACVATVADKYIGLTDSTMKQSASYPGIDLGTWNIDGSHYPHLKRTPHYRDGAYTLDDRSKWAVDVWEIGQGMRLKRTTPPSSCNSANLHCDRTQYVDLFSCQCVVGCPNLINGQCIGPDEARCDPGFKLDDAKNCTLYSCVTATEECRLSDGSSGATCNVEFDTCVCSDVTKYYDHTNKMCVDGCTGLVGGICIGQNTATCYPGWVADGNSLCAKYDCSTLPEGDSTICGGPSIATCDFTSKLCVCEDKRQYYDPSLANPGCKSGCSGGVQYGVCSGSGQAVCIEHVTSVAGATAGDLLCTEYSCDTISCGAQAECDSELKVCRCPLSSQYYNLKSHACVEGCLSLAEGVCVGQNRAKCRPGYGSHNGVLCGAYSCANDNSNRKCGGLGTCEGGQCVCSQGAVLFRGTCREGLCKNGNVVNGVCQCLDGWSSPATEDQIEASGYCSVYTCPPDGTLIELATPGSLLAIRACPSHGFRLTSDIDARSYEWEGVDFSGTLDGNNHAISGINLRVSSLGSEYSASFFKHLTGQVRNIRLVFASSPDASAIGQDSVCKFGLLSISADASAVLENVAISGSLSLQVPASVAAEVGGVFHTCPSAPTAVSNSVAMTCSGANCTMGGYCHTVSAPLTGGTSTATLRCQATDGTVCIAGGFAYVVRAPISNILSAATISLVPAADIAVQSARVSAGGIAAVLSEGASASDCQFSGCIAREQGSLNPALVVHSGGAFYMVSGTAAAKTVIERCTVTSNELSGIEMAGFAGNLIHATVRDCSAIVTKIDGLQGVSGFAQYVNDSVIERSFVKANASVTAEGQKKWIVGGFCGLVANSQILNTYAELGNFSSRNTPAGSSVGGFVGRVENSVIRDSFVRATLLEAVSGMSGTSQWTFGGFAGFVDHVSAGPMEIQRCFGDIANLSMSTAVSVYFGAFGGQIRKKSSSKAVTSKTISNVWINANVECTFVVPKDTSKAPSNGVGMFAGKMYNGVALSLAMINGSLTCRGANPPSMASSLYHIGLFNGAKTSDSSTSAEFVIINVTAGDIPGIGLKGEPEDKLICLTCFANGDLLTPVAPSSIAVDPDPNLKTAEELRKLSTYTGFGIGISESKWTKSPGEFPFLNSLPVKVLIDDQDKYIYPTCTQDCWDYTSFWVLSSSGPTTDNNKNSCADIENCMVYSSDCTCSQCNLKYYPSGSECLACSTGCQTCRSTDFCEICEDGQVSNGAGVCIAPSCDFRYCQTCSNDGATCETCSIRAFKASTGQCERCSEGCKQCTDSTVCATCGDDNYKPDPENNVCVCKDGFYSSERKCLQCNRACQTCTGGTERDCIACSEGWVRDDATSTCTPQCAEISGCLLCPSPPACGTCLSDYDLVDGSCILRGSCRVDNCLTCVAGNVNSCASCRDGFYGSNCAACPERCAACVSAERCTACKSGYVLSPGEQCVSCSISNCGQCSSDNFCFSCNDGYYLNAGACPPCNVPCKTCVNSADKCTSCQSGYELSVNTCISTTACDVENCRSCISAGVCGRCNTGYYLSGSRCSRCNSMCRECFGPNTCTECAAANAIPDEDGICVSTVCNVSNCLRCDLVTLRICTMCDSGYTLSSGNTCEPNAPPANKTSGVAVGVSVFVVIVVIAVIVIIVVFLKKGIIKGRKPKHNLGISSRHSNSMLSYDNLNESVSAPLL

SEQ ID NO: 98 - protein, 736 aa, Giardia intestinalis
MLGLLFLGAVVSSTADVFGQECTTAAQKDTCATKKCITVSGTELCRECVGGKVPIDGICKDTTDSSVSLYGCEHSSGTGFCTSCKDTAFLFYGSCYAIDKVPGNLVCSKAESGKCTECRQGSKFLFTNPDDSAAERCILCYDNVGFGSYKGVDGCRYCLPPLTGETSAECNWCQNEKYGPIDGVCKEPSRHLCADGACSNCYMTHIQHNGGCYTKTETVAQKICTTENQFQVINITACKKCAIKGEVPMDGRCIKGLLEPKCNPYPNTDGSCTNCTRSGVNYNTFLFNGGCYNMSDYIGSQICTKVNDRAECDAWNTGDYGVFKLPDYHMAYPCSNTSAGGIQGCSRCRYNNTEKKVICYDCEYDTLAFDGMSCITETNCNGDHRQRKCPGSSKRGCRCECMDKYYRSGEQCSACASSCLRCNNQEANSCTLCPSGQALAYNGDGTTGTCKAGCTPDSTCEACGLEVDQTKYCSKCKDSAQYPLNGACTPASNARASACLRQSDGACQQCSSGYFLMGGGCYQVSKYPGRFVCKRADGGKCVDTTDEYNINSKGELVDCNSNCETCVKGQKTQCLSCHSNKYLKKEGTTSYGTCVSRNDCKDGYYANHDTMECLPCNINDCVTCHLIDKSILCSLCRGTSLVGLDKRSCTTIAPENAVEFWGRYVCNEDSVLSGNACVRKDSQDTGRLSNKASIGIGVGVSVVVLVLIGVLIWWLVFQRRRGSGFGGSRDMLTSRD

SEQ ID NO: 99 - protein, 71 aa, Giardia intestinalis
MDACPENSAENPASAYACSSGYSPDTNGTSCVSTDVRLSTGAIAGISVAVIVVVGGLVGFLYWWFICRGKA

SEQ ID NO: 100 - protein, 226 aa, Giardia intestinalis
MAHCKADGCSLNVGGSKYCDQCEEGYAPVDGVCTSIPATARDASGCKASGGKCTECGANYALLSGGCYNTQKLPGSSVCTAAQNKGQCQTCANGQTYADKNCPTCTEGCVKCAGSKETCTDCLAGYYKTIDNKCVKCTASSGDNNQITGVENCISCAPPAGGSGPVTCYVTQQKADDGTGGDTGGDSTNRSGLSTGAIAGISVAVVAVVGGLVGFLCWWFVCRGKA

SEQ ID NO: 101 - protein, 130 aa, Giardia intestinalis
MTAAVCTACTNNNKPNLAGSGCFACTVDGCSHCGAGDKCEACTSKDQRPNTDGTKCIACNIDGCVRCSEENKCGQCSDGYRLEGGRCVSSGANRSGLSAGAIAGISVAVVAVVGGLVGFLCWWFVCRGKA

SEQ ID NO: 102 - protein, 419 aa, Giardia intestinalis
MLVGFLLVCATVLAKHNGKNGCEKASNTACEERLTQAGCETCTGVGQDQTCLTCGGGKKVQLNGVSCDATCPQNSAANDQNVCVCNPGFSLNNGKTACEKASNTQCNTPNCKACDNPKTDNEICTECNDGNYLTPTKQCTQSCGAIGSYYNGDKECEPCDPSCAGCTTKGPAKCTACPPGKMLKYTNDDPNQGGSCVDECKAEVDGCAECGAVIGGTKYCSKCKEDKWAPQNGVCANSVTRNSFCTNAAGGVCTQCAADHFLQDGGCYKLGRQPGEQICTLADSNGGCQTCANSLQPNNGACPSCHSTCKTCRDANSANACTTCATGYYMVGLDPGTCTSCESDSGSVKGVAGCMSCAPPSNNQGSVLCYLKNGDSTGGSTNRSGLSTGAIAGISVAVIVVVGGLVGFLCWWFLCRGKA

SEQ ID NO: 103 - protein, 836 aa, Giardia intestinalis
MTLVVSLLLLYGIFSECAQNSDCGGATGVCNVTIGGKKYCSKCDGARVPVNGDCRLLSLSRSICIVPTDSTPTPGSCSGCIRDFLFYRGGCYRTASLINAICKEKHIVEEGMYCGACAIEGDVPIDGVCVAASADSSGNTCDKGVCTTCGNGYFFHYGSCYKFGGSPGANICSDSTSTTGSVCGSCGSKFVKNPSAGPSATSCFACYGLDGTLFCERCRMNVLTSTDVKPTLCTKCKSGHIPLDGRCISAFSAASALAGCSTYKGSDNAMGLCETCSSGYMLFYGSCYSVNGPLAQAICKTENQIYLGGRVFCKQCAQTDHYPINGLCIADKGSHTCEAGICTACDTSTTPVDNSKVFPFYNGCYDANSAIGKLICQEASNGACSTCNTNETSNIIANPNSADGQPKCLGCWDEAATGVANCGGCATGTDGDSKIVCSKCTDSTEPKDNTCPQALPPTTPEGCAVQGCQACSKDSATTCDTCFSPLVMKEDKTKCFGSCLALGLGYYNDAGVCRPCTSKCLTCTDGTTCTQCAEGYYLEVSGAGSTTGTCKACAAGCSTCTGAGDSLCSTCVTGYYAAFNVRQGGPGKCVQCSVSEDGYTGVEHCAACYSTTGQTTGAKNVVCESCEDGYLKEHVDNKVVCNPPAPKCTVPLCAICVENDAMRCEHCTTGAYLCPRTAACTKDCASCGGSMYPDEDLGECQPCDITNCLVCATGLKCESCAENAVPISPDVYHTACMGCSDTGGMDGWVGLAGCTTCELTDKGGGSVNCLDPGYYRRGGLGGGAIAAIVIVVLLVLAVAGFLVWWFVFRRGGRPKRGAKYTSLMRGESYDYRQSLI

SEQ ID NO: 104 - protein, 1144 aa, Giardia intestinalis
MLAVLGLLIAFQAAKCTHSNQVSDCAEDRCEEINGHELCTECRNAGYIPFNGHCIKYDSEQHSSCKSADGTPIVSEKRCGMCTDSMYLYKGGCYACGNLYPGNLICSECDKGVCKSCTSGFFRNPAASQTVDSCVRCDDTTGVADFVGVAGCLHCLSPSKSKGPDVALCVKCKLSTHKPNPNGDICYRCEIPDCPRCAADDSCAVCGRGYLKGTTKRVCVSQCGVGFYVAPTQLRQCKKCSGACQTCEGPNETDCTSCNESEGYFLAAENGTGRCVSCGDEQGHAGWKGVANCKTCIPPSTPGVVKCTTCELGHSPINGKCEVECGEPSGYCEENSCNVAWSDDLLCSRCIEGYAPIEGMCNVVTPDHGSGCVANKGRCEKCGLWYFLYQGGCYNVWLGYNHFVCLEAGAKPEEIGLCKRCASGFRNEKGICVRCRDPYCKTCIQDTNTCESCIDGYYDPSFCKRCHDDCETCVGEGPRRCLTCPSKKYLLPIYKNIGVCVDGSQCGYGMYGDISSQKCLPCSAGCATCRSSRDDECISCYLRTHFFVPTGQNRGKCIECGDTTNPKGINGCRECAMENDLVKCLSCRVGYILVNGKCQSHCEDPNCAAGSCMVGIGEELYCSLCKTDGHAPVDGICTDVTSAHPSGCVTGVGFDSARSCIRCGAGYFLYMGGCYQENKEPGKSICTWAGVPGYVNGNNYGLGLCNACAAGYENQDGVCRPCTTVNCERCRMDDQGEVCTHCMVGYVLDQAGTCTTKTMGSCTVPDCAECTEGKKCRRCGPGFFLTSVGTCVDNCRSIPGHYALDATEKSPARCALCEIPNCKECGAGKLCAVCSDGYFSDNGVCTPCDSTCATCVAKGPSSCVSCPSGYAVTSESGVGECKKPCTPSADGCKRCDASIDGASYCSVCSAQTAFPLNGKCVGLSARAGSACVSVVDGACTSCADGYFLLSGGCYQVDTYPGRTVCHAEERGVCTKGAHGKMVSESGILQECSIANCAECTADACVTCRLGYVSVDGQCQKCAQGCVTCIAPDNPQMCTLCDTGYYQSTTGSAFTCTACGADNNGMKGVNGCTCCMPPEGKVGSVLCYSFDALPSIIPTPKPSPDPVPSSTRKTAFIAGVSVTAVLLVTGLVSFLLWWFLCRRSR

SEQ ID NO: 105 - protein, 1151 aa, Giardia intestinalis
MLAVLGLLIAFQAAKCTHSNQVSDCAEDRCEEINGHELCTECRNAGYIPFNGHCIKYDSEQHSSCKSADGTPIVSEKRCGMCTDSMYLYKGGCYACGNLYPGNLICSECDKGVCKSCTSGFFRNPAASQTVDSCVRCDDTTGVADFVGVAGCLHCLSPSKSKGPDVALCVKCKLSTHKPNPNGDICYRCEIPDCPRCAADDSCAVCGRGYLKGTTKRVCVSQCGVGFYVAPTQLRQCKKCSGACQTCEGPNETDCTSCNESEGYFLAAENGTGRCVSCGDEQGHAGWKGVANCKACTRPSTPGVVECTECESNRLLIDGQCRKECDDPSEYCEADACDVVWRNELLCSRCKEGHAPLNGMCSELTPNNRRACIASKGRCEKCGPGFFFHQGGCYQVELEEKNFVCVEVGTKPEEIGLCKTCASGFRNDKGICVRCRDPYCKTCAQDTNTCESCIDGYYDPRFCKRCHNDCKTCVGESPEQCLTCHPKKYLSPIHKNIGVCVDAWQCGYGMYGHPFALKCLPCSEGCATCRGSEENDCTSCHLRTHFFVLTGYNRGQCIECGDTTNPKGINGCRECSAKGDSVRCIACKAGYVLVGGKCLSHCEDPNCAAGSCVVGIGEKLYCSLCKTDEHAPVDGICTNVASAHPSGCVTGVGFDSARSCLQCGAGYFLYMGGCYQESKEPGKSICTWAGVPGYVNGNNYGLGLCNACAAGYENQDGVCRPCTTVNCERCRMDDQGEVCTHCMVGYVLDQAGTCTTKTMGSCTVPDCAECTEGKKCRRCGPGFFLTSVGTCVDNCRSIPGHYALDATEKSPARCALCEISNCKECGAGNFCAVCSDGYFSDNGVCTPCDSTCATCVAKGPSSCVSCPSGYAVTSESGVGECKKPCTPSADGCKRCDASIDGASYCSVCSVQTAFPLNGKCVGPSARAGSACVSVVDGACTSCADGYFLLSGGCYQVDTYPGRTVCHAEERGVCTKGAHGKMVSESGILQECSIANCAECTADACVRCKLGYVSVDGQCQKCAQGCVTCIAPDNPQMCTLCDTGYYQSTTGSAFTCTACGADNNGMKGVNGCTCCMPPEGKVGSVLCYSFDALPSIIPTPKPGPDPVPDPVPAPAPSSARKTAMIAGVSVTAILLVTGLVSFLLWWFLCKRT

SEQ ID NO: 106 - protein, 428 aa, Giardia intestinalis
MINRSSRAAMLLLVLCFLMSALAAQCKGHQHSNCATGWCRAVRGVEVCMRCKAGHVLIDGVCADNSVVYGAGSACQILNCKQCNADNTQCEQCEDGYTPSAGNTQCNENPEARCNTPNCKTCDNPKTGNEICTKCNDGDYLTPTNQCAHDCTAISGYYGDTDKKCKPCSPECAECVGPANNQCSACPAGKALTYGGGDPAQGGTCGDACTADKNGCKVCGARIGGTDYCSQCSVGTQAPLNGVCTANARAQFCTQVTSGSCTSCSGGYFLKNGGCYQADRQPGKQICTLADSNGGCQACANGLPPSSSDVCPSCHFTCKTCSTADIANTCTTCATGYYMVGSGPNTCISCESDSGSVKGVAGCMSCAPPSSNTGSVLCYLMNGDSAGGSTNKSGLSTGAIAGISVAVIVVVGGLVGFLCWWFICRGKA

SEQ ID NO: 107 - protein, 120 aa, Giardia intestinalis
MCSSGVCNACNSGFYLEKGACKACSKGCATCPHGEACFDCLAGYYFSESTCKACHKAISKCSLCMVPEGAATPICLEYDNTSKKSALSSSAISGIAISVVLVVGGVAGVLVWFFVFRKKN

SEQ ID NO: 108 - protein, 806 aa, Giardia intestinalis
MTLASLIVILTCFLAGSFSEETFVYYNGFGYSCEGKISQCLQDRCLVDLGAFFCTECSQDYVPINGTCVATTDEKVNKAGCVKSPKGGWCTGCKNGYFLFYGGCYELSGRWKASICDRAENGICQECGKGSTYYTPITFTNPNATSPERCIYCGDIVGFGGSSGVYRCQYCNQHRLPGNTIPSCSECSERFMCPFDFRCRSVKGLELGYCYFCPRGYVWSQFGCYTTDSVIGNSICLPRNTIDIQGQSLCTQCANSSEVPQNGLCGSISGFDNVCTKDSETGKCTSCKNDSNRQYFLFYGGCYLFSYAPGQVGSQICQTVQNNVCTACNSSINEVFTKNNGCWRCGDSANGGIEGCQRCEMKDSSLQCLECRDLYLSLDKRSCLASCPKGQKGIKGSSSSVHSCACDDGSYLKDGKCVGCAVENCAECDESSCKKCKYGYTLSGSQCVATKCKDPNCDTCEDRNVCTKCAGGNSLDPHGLCVKDCLGSAGYYKATVGGVSRCVACTLGNCAVCESESKCKTCRDGFYVEGSGGCKPCSSECATCSGPASGDCTSCPARKRLQYSDGAKGSCVPQCVQDSSCAECGLTVGGTSYCSRCAKSTEYPNNGACTFSSLRAAGIACANVAAGRCAACSSNSFSLNGGCYTSTLLPGKTVCTKESNGWCDSTVTGYGITYNGTLLTCPTNCAMCSSGVCNACNSGFYLEKGACKACSKGCATCPHGEVCFDCLAGYYFSESTCKACHKAISKCSLCVVPEGAATPVCLEYDSTSKKSALSSSAISGIAISVVLVVGGVAGVLVWFFVFRKKN

SEQ ID NO: 109 - protein, 308 aa, Giardia intestinalis
MVTCSGCETKRLSPLNDACLEECPAGTYPDNRDSTGICASCHNTCASCSTNAETSCTACYPGYVLNRSSGDTGTCIKECTGDFMAHCKADGCSLNVGGSKYCDQCEDGYAPVDGVCTKVASTTRDASGCKASGGKCTECGANYALLSGGCYNTNKVPGNSVCTLSVGGKCTMCVASGADPKGQACPTCPDGCLKCTGNVGSQTCSVCLSGYYLSTNKCFRCTAGDGASANAITGVENCISCAPPTGGNGGSVTCYVKNDDSTGDNTGGSTNKSGLSTGAIAGIAVAAVVVVGGLVGFLCWWFIGRRKA

SEQ ID NO: 110 - protein, 827 aa, Giardia intestinalis
MLGLLPLALLASLCKSSRDVYYNKFGVGCEGKQENCAQDRCILLGSDQLCTQCVPGYVPIDGKCQKYPGASSPPCTPDDPASPTRCIACKQETNIFLFYGSCYKITTTQDRNLGNFLCSEASNGVCTECYKNNTEMYVFTNPDTSAAEKCILCSDTVGFNGYKGASGCLDCLPPITDKIGIALCVKCHYTDKDRHFYPIDYQCQAKGPHNCVNGYCTSCYKTHLFYEYGCYSRHSSTGFAICVEANQYELDNVTICKECANASYAPRNGACILIKENPSIEEIAFKCTKDPTKGLCTACPASAKSFLFYGGCYDEDAHISSRLCSRIGSNACEQWNSAFKWIFSKNGDNNKNGYLCGDIANGGISGCATCNYASGAVTCTRCSAGCLGVDGKSCSEGCSGDTRGVCTKVAEGSESTEVSCRCVCKPTFYNSSGTCISCTDSCAVCKDGTLTGCQQCSPGKILNFSIVSSESADCINQCSVSSECAECGITIDGSRYCTRCKDASTYPFNGVCIPNTQRDAYCTSTANGACTTCSGAAFLMNGGCYTTEHYPGSTICDKQSNGKCEKTKEGYGISDDGKLLECDPTCLACTAPGPGHCTRCPSGALLKRASGAATGSCVDPGACGDGYYAYGDACLPCATPGCKTCGHASFCTECAGELFVSLDGQSCLGECTGDKVVGEVSGGVRRCWCERGFLPALDRSGCVLPTECPPDMPLCAACDESGRCLLCVTSGHNVQVDQRTCAEGCGARASSNQGLCMCELDAVLTKGVCVPAKELARKRTAAIAGGTVAGVAVIGVLVGFLCWWFLCRGKRIGASPSTTALVRPKSV

SEQ ID NO: 111 - protein, 852 aa, Giardia intestinalis
MGSLKALDRYWAVLSQCTCGSFGSHWMVRRDCNGATRCTNMTYTLRQPQFYSAQSTSFWPCAEIADCRVVFAIDPVSVDSISACGQRVPEGSINCINQRGLTDVPRVCSYQSINRAMFGSFVLAGVLVQIAWAEKVTERAAQCADNTNCAAEACNVLIGGKLYCSQCNTGFVPINGQCAGKEDAKTKCKDTDGGDTADQTCGQCAEQTFMYKGGCYEAAQQPGQTICQAAENGKCTQAKAGYFVPPGADASHQSVIPCGDEEEITVKNDKKYKGVVHCTQCNAPAEAADANAKAATCTACGDSKIVKTAKDQATSCVTEKECTDAPGFFVDTTSGKKCSKCAETCKTCKTEAAKCTSCKDDKPYLKKDDESTTGTCVDANGCPATHYVDKEAKECNTCVSGGTVDCTTCEKGANGVVCKTCTTGTKTKFGLGKKSCVENCPSNSSDEKTPGTCECVEGYVPDDAGTGCTKKSDPQCNTPGCKTCSDPKKDKEVCTECEDPKALTPTGQCIDNCGDLGGYYEGTNEGGKKACKKCEVENCLLCNGQGQCETCKDGYYKSGAACAKCDTSCKTCANGKPNGCTSCEPKQVLSYEGEGTGTYKPECKPVSGGKDGTCKSCDLSIDGTSYCSACNVGTEYPENGVCVKKSARTASCQVEPSNGVCGTCAKGFFRMNGGCYETTKLPGKNVCEEAAPTGDTCQTPADGYKLNNGALITCSAGCKTCTSQDQCDTCKAGYAKTGGNTKKCVPCATGCSECNADDATKCTVCAAGYYLSKEKCIACDKSDGGSITGVANCANCAPPTNNKGPVLCYLIQNTNRSGLSTGAIAGISVAVIAVVGGLVGFLCWWFICRGKA

SEQ ID NO: 112 - protein, 606 aa, Giardia intestinalis
MLYSDSDSDSAMWCGGDSGGVGLFFMGGCYKTESQPGSDICTAASNGVCTTCKADNGLFKNPVTPQKPGSECILCSDTKGADGYTGVANCLKCTEPTNSPGAATCTECQEGYYKENNECNQCDQSCLTCSGSGPNHCTSCKEGKYLKSDNTCSPTCEGNTYADPVTRTCKESGIADCTACEYNTTVSKPQCTACNNKKVKTELDGTTTCVDDAGCATDNVDGSHFLSDDSTKCILCSDTTTGTEANDKGIANCKTCKKNGAKPTCSACLDGYFGSDTCTACGANCATCSAAGNDQCTKCKPGFFMKQPGSTGECVACDSKADNGIEGCSACTNDGGAFKCTDCKPNYRKEGSTGSVTCTKTCEDDTTCGGTSGACDAMIIDDQGTTKHYCSYCGDSSQAPIDGLCATDKNGNTCTNNVCTSCTQGYFLYMDGCYSTQSQPGNLMCKTANNGVCTAVNENNKYFIVPEAKPTQQSVLACGNPLGTLVDTKAYVGVDGCSQCTAPTAPSEGGMTPAVCTSCDSGKKPNRDGTGCVTCSDTNCKSCAMDGVCGECNSGFSLDNGKCVSTGANRSGLSTGAIAGISVAVVVVVGGLVGFLCWWFVCRGKA

SEQ ID NO: 113 - protein, 397 aa, Giardia intestinalis
MKEDQSACLLCGDNTEDTSESNKNQGTPNCKTCTKTASTKPVCETCKDGFFFNTGDKTCTNKCDATCKTCSAATDANRCLTCMPGYFPIDSTDQQGKKCVPCDSVDDKGREGCSVCSNNGGFKCTECKVNYKKQSNGDAGDDYTCVKTCEDPTACGGTSGACDAIVIDNDGVEHHYCSYCGNQGDVPINGICTSSLASNTCADGVCKSCAQGYFMYMGGCYDVSKAPGSHMCKKADNNGICTEAASNRYFVVPGAQTTDQSVLACGNPLGTLVGTQGTAKAYVGVDGCSQCTAPAGLSEGGMTPAVCTSCDNSKKPNKDGSGCVLCSDTNCKSCVMDGVCGECNSGFSLDNGKCVSSGANRSGLSTGAIAGISVAVIAVVGGLVGFLCWWFVCRGKA

SEQ ID NO: 114 - protein, 185 aa, Giardia intestinalis
MTGSGQRSVSAPVILLPVTGEHQEAFSLHGLPCTADAMFAKLIFTSLVLQLAEAIRPAEKSRSDNACGDLGTAGCATCDSNSGNKICLTCTDPAKFIAVNKKSCKAACDANGGEIEAPVVGSTKACKCDEDNGYTLQGDACVIPNTNKSSGLSTGAIAGIAVAAVIVVGGLVGFLCWWFLCRGKA

SEQ ID NO: 115 - protein, 1299 aa, Giardia intestinalis
MMSFFVALLPALLRCGQCGSTIPHCLDCLDLDNNYCRRCQEGFLPVDGLCLGGNASIPCTSHLGGTCVGCRPGYFLFHDGDQMGACVICSHAVLKLGPGCKDCVLVGGVPHCLACHSTYFGINVMSDSGATLLQCTTLSERRMPLQRRHKGLFVSPGQATCTVQNCRVCASQAPNICIQCTRGYSLKDEGRTCICGVPHCTTCSPTDGQQCTQCDANYALTPHRACVCSVRNCIQCGSQGTARCQKCITGYRLSEDGSTCSCGVDNCAFCSSTDGAQCVTCVTGYVQSYSQRSCTCAVEHCAECFPADGSQCVRCVTNYVLSHDFKVCASSLENCLYPSPVNGSVCSICSSGYVTAFSGEVCLSVKCQVLYCEECDGVLCAQCIKGYSLVNDGLGCACNALNCLICNPDDGDLCLVCVGGYDVTPDGLCECAIRNCATCSQDGRSCKACINGYRKGEGGCECLIDACKTCSPQDGQLCDECHLNYDLVHGACVGKIPGCLVASPIYEGSCEFCNTNWELFHGRCFCKIRNCNKCHENGKMCIQCANGFVLQADNTECACTLTNCAECDPEDGTKCLACKTSYTLDSSGQCTTSTCSIDNCKNCGQSNVCAECNDNYELSTNSQTCTCLLLNCSKCRPSNGQQCLECVTGYKLDLSMNQCICDVQLCETCNSSDGALCDTCITGFIKGPTSATCNCAADNCRVCNLSDGTKCEICNLGYTLTGTACQPNVANCKQYSLSRGCIECERGYSLMPSNAECLCTVQNCATCSPTNGSECTSCVQNYTPQEGLCLCMVQECLECDSANGNLCNVCVYNYALSEDRTTCACDVKNCILCIARDGKKCFMCEKGYRLTETSACEEIPCSVENCLSCPPGNPDYCIVCQRGYWPTKNGNECACSDPACGECDFENGEICLHCNANYREFQNKCLCSLPYCTKCDINDGSQCEECENGFMLTPTKACILRVCFTNQDNCKVCGTGAHADKCLTCVSGYVPIDGVCVQDSKQDVCNQYSGTCTGCAPTYFLWQNGCYPCNMIPNCIECYMTKTYGPLCTMCEPFYTLRGGKCQLNPYCSQGCVCNGELQCTDCIAGYTMISNICTLCESLFYMCAECSKTFCTRCFGGYSISYHDCVPGVCRENAHGCLVCANDYTCARCRSEMYLYRGACRECNFAGSNCADCTFDKEYKCLRCLEGYTQVVSNGVSYCVKCPDIDHCLECAYNSTRSSQFQCTTCADPWLVDTATGTCFIRNASSASTATAISCSVIGAAIAIATTIALIVKCQHHRHARMVRQVDALVTEADELAH

SEQ ID NO: 116 - protein, 128 aa, Giardia intestinalis
MLLLVLCFLMSALAAQCKGRQHSNCATDQCRAGHVPIDVCADSSAVYGAGSECTDPNCKRCDQNPAECEECNSGFDLDGSTKQCISSNTNKSSGLSTGAIAGIAVAAVIIVGGLVGFLCWWFLCRGKA

SEQ ID NO: 117 - protein, 748 aa, Giardia intestinalis
MLVGFLLVFTVTQAHRTSVSTDCPIENCQTCSSDKATCEACKPGFVASGDNRACNPAPADCPIENCQTCSSDKATCEACKPGFVASGDNRACNPAPADCPIENCQTCSSDKATCEACKPGFVASGDNRACNPAPADCPIENCQTCSSDKATCEACKPGFVASGDNRACNPAPADCPIENCQTCSSDKATCEACKPGFVASGDNRACNPAPADCPIENCQTCSSDKATCEACKPGFVASGDNRACNPAPADCPIENCQTCSSDKATCEACKPGFVASGDNRACNPAPADCPIENCQTCSSDKATCEACKPGFVASGDNRACNPAPADCPIENCQTCSSDKATCEACKPGFVASGDNRACNPAPADCPIENCQTCSSDKATCEACKPGFVASGDNRACNPAPADCPIENCQTCSSDKATCEACKPGFVASGDNRACNPAPADCPIENCQTCSSDKQTCEACEPGKHLTPTKKACLDACPVGTYLSGQTCAPCDPSCAECSGAGASKCTACPAGKMLRYADESKLNEGGTCVEQCVEGPECETCGLTIGGTKYCSKCKGSNVPLNGVCTSNAARTLFCTTAANGACTVCAAGYFIQEGGCYKTDRLPGKSICTTPTGDGKCQTCANGLTAVSNMCPLCDSTCATCTVANQPDKCSACPPGRYLDASKACKLCTETSGSIQGVANCASCDPPTGNSGSVICYVKTDGTDNGGSVNKSGLSTGAIAGISVAVIVVVGGLVGFLCWWFLCRGKA

SEQ ID NO: 118 - protein, 587 aa, Giardia intestinalis
MLVGFLLVCATVLAKDSGKDTCFPGYTLNPTTKKCDRNSAPCEVEGCDVCEESNPQQCKTCGSGYTLNPTTKKCDRNSAPCEVEGCDVCEESNPQQCKTCGSGYTLNPTTKKCDRNSAPCEVEGCDVCEESNPQQCKTCGSGYTLNPTTKKCDRNSAPCEVEGCDVCEESNPQQCKTCGSGYTLNPTTKKCDRNSAPCEVEGCDVCEESNPQQCKTCGSGYTLNPTTKKCDRNSAPCEVEGCDVCEESNPQQCKTCGSGYTLNPTTKKCDRNSAPCDTPNCKACDNPKTDNEICTECNDNNYLTPTSQCVSDCTTLKGYYGDDSGKKTCKRCNDACAECKGEGADKCTACPAGKMLQYTDADTPANGGTCMNQCSVSPANDGCAECGAQIGGTAYCSKCKNTQQAPLDGNCAANTRTRFCTTVSNGACTQCENNYFLKDGGCYQTNRQPGKQVCTQANGGKCQTCANGLAATDGNCAECHPTCATCSTAGTADKCKTCATGYYKENGSDTTTGLCKKCSEKISGCKQCVSSSGSSVICLESEVGTGGSVNKSGLSTGAIAGISVAVIVVVGGLVGFLCWWFLCRGKA

SEQ ID NO: 119 - protein, 1167 aa, Giardia intestinalis
MIILLGILFASQAAKCTHSYQVNDCAEDHCEEINGHELCTECKNDGYIPFNGYCLKYDSGRYSSCKNADGSAITNQKKCGMCTGSMHLYKGGCYSCGNFYPGNLICKECDRGVCTSCTSNFFKNPAASQTVDSCVRCDDTTGVSGYVGVTDCLRCSLPSNSKVAKCRTCKLSTHKPNLEGNACYKCRTPDCYRCKADNACEVCGNFKYLQGTTKPYCVSACGVGFYSVSVPSLQCKKCSATCRACEGPNERDCTACRESENYFLAATNGVGKCISCGDERGYSGWMGVANCKTCYPPNGPGVATCNKCERGYSLVDGKCKADCDDTSGQCAAKGCHVTIGDKSFCSLCNTGYAPVDGICTTVQPDNPSGCVANNGQCNKCGAGYFLYYGGCYSGSTEVHKTICLEVGTESDRVGLCKTCADGFQNKDGVCILCWDPDCKVCSKDTTKCEVCRDGYYDPEFCKRCHSSCKTCMGESSKQCLTCPSNQYLRPIYDNAGMCVESTNCGYGMYGDSSSYKCVSCSAGCLTCKAAGDDKCTSCPIRTHFLDGSESGAGRCIECGNTTNAKGIDGCRECTMESDSVKCLVCKAGYTLVNGKCQSHCQDSNCAAGSCVVGIGENLYCSLCKTDGHAPVDGICTDVTSAHPSGCVTGVGSDSARSCLQCGAGYFLYMGGCYQENKEPGKSVCTWVGIVGSVNKNNYGLGLCNACAAGYENQDGICRPCTTVNCERCRMDDQRDVCTHCMVGYVLDQAGTCTTKTTGSCTVPDCAECADGRKCRRCGPGFFLTSVGTCVGNCRNIPGYYALDATGEAPARCALCEIPNCKECGAGKLCAVCSDGYFSDNGVCTPCDSTCATCVAKGPSSCVSCPSGYAVTSESGVGECKKPCTPSADGCKRCDASIDGASYCSVCSVQTAFPLNGKCVGLSARAGSACVSVVDGACTSCADGYFLLSGGCYQVDTYPGRTVCHAEERGVCTKGAHGKMVSESGILQECSIANCAECTADACVTCRLGYVSVNGQCQKCAQGCVTCTAPDNPQMCTLCDTGYYQSTTGSAFTCTACGADNNGMKGVDGCTYCMPPEGKVGSVLCYSFDALPSIIPTPAPAPAPAPSSTRKTAMIAGVSVAAVLLVGSVVGFLLWWFLYRRTQPYGAKHVALSRKRIPTTASITTPLN

SEQ ID NO: 120 - protein, 102 aa, Giardia intestinalis
MLYKLQDIHGHPTLADRATHIYSFDALPSIIPTPAPAPAPSSTRKTAMIAGVSVAAVLLVGSVVGFLLWWFLYRRTQPYGAKHVALSRKRIPTTASITTPLN

SEQ ID NO: 121 - protein, 213 aa, Giardia intestinalis
MNGCYDVSKAPGNLMCKTAANGVCTTPNANNRYFIVPEAQATDQSVLACGNPLGTLIGTDSTAKAYVGVDGCSQCKAPTQLDTPGMAAAVCTSCDSSKKPNKDGSGCFTCAVSGCSHCNRDNMCEACSSGKKVSPGRKSCVDGCPSNSTDTDSVCVCSDGYSPDDAGTSCVSSGANRSGLSTGAIAGISVAVIAVVGGLVGFLCWWFLCRGKA

SEQ ID NO: 122 - protein, 1335 aa, Giardia intestinalis
MLVFSVGLLALRIARIKGFSSVETATSDLKCYHSLKLGEDTVCTDCMTFNTVPINGICVPDDPNICITLQGYNTKCGSCTSDYMLFEDGCYDLNGKYAPLICAVENRYVLGGATYCSQCAYLDYVPVNGICDSANPFDTCANNVCTKCGFSSFLFNGGCVSKSSSLGKLVCAGTVSDGKCTQCADGFSTDATGMCIPCEVPNCSSCPNGKSTCSSCKEGFFLDSTGVCMLCRHHCAVCSSKDDCDKCRANAQELMIGSKRVCIGCGDTSSQHEGYLGIEFCSQCTLPSTPGPVQCHKCFQNYYSLTDSATGFVSCYAACPIGTYGDAYSMSCRSCSANCKICESSHSCTECTPGYYPGFMSCVPCKVSGCSRCTSGYAGDTCEMCLPETPYMNLAGTECIAACPTGSKPDTSTPTKCICDFGYGLAENKNACMNCSDRYCKLCAEDPSVCTECFYGTKADGAVECPPPVCADNCVSCAQAGHNFCDICQEGFRLTADLKCARCSDENCLTCANDAAVCTGCQYGFRLSSSGTCIQCGSGCKVCNESMCIECSNTAHFVSIDGVSCDTECPSHSTPVSDSNASRCVCNNGYTPELEARLCVEEPKVCPLGCICESAPVCSGCADGFFEKDPDRTDSGRCHSCALTTDSQGDQTTTGCKICRLVEDTILCSECLPNYKLYDSNGVVHCMKTCPSGTHDTGSHCVKCLTNNCMQCNADKTVCEVCVHDYYLWENECISCSSLECAECGLLNTCTKCMSTKKCRACAIPHCRTCNALGKCTVCEKGFYGPMCQPCGGNCLTCSSENPGLCLECQSGSIMSMGKCYNMCTEGEGSGKCAIGSCDMQTGACMRCSVLSEFPINGLCTSDPRGNNCLAGRCIECTAGYFFHGNGCYSIAAVPGNGICVASLRGYCTACHDGYSLQKDECVLCKVSGCAKCVSDPTICELCTIKAYVVDPAGSSCVPKCAVPSFGVSSSSKHCVLCTDQNCLECTDLADNCSRCKIGYHLVEGTCVACHSTCLTCSGPGESDCLTCIKGKAHSAGTGSSTCTDACVENSRNCLLCNAVIFGTAYCSQCTSGHYPINGDCHMAARDLICLNGKNGICTHCAPGYFLYSGGCYQSDRLPGSYVCAQSATDEGLGVCSKCQLGYGPLSGSCTPCESTNCQACEYSSNICTVCSDGYYGDSCVQCPKTCASCKSNLQCTQCAEGYFAATDYEVFDPSHCVACSDEEGKNGYVGMQGCLSCVGPAVPGPILCLSEAGPYVPVVPPASNARLSLTIGLSVTAVALLLIALGILLWKLLSARKLSRTRCMHLPGSTTELLAGASGTGQSMIFDSINLSIT

SEQ ID NO: 123 - protein, 530 aa, Giardia intestinalis
MTNGPSRAAMLLLVLCFLMSALAAQRTKQPTSDCGVANCAQCNADGRTCDQCSEGYNLNQEKTQCTKACAVANCAQCNADGRTCDQCSEGYNLNQEKTQCTKACAVANCAQCNADGRTCDQCSEGYNLNQEKTQCTKACAVANCAQCNADGRTCDQCSEGYNLNQEKTQCTKACAVANCAQCNADGRTCDQCSEGYNLNQEKTQCTKNPEARCNTPNCKTCDSPKTDSEICTECNNGNYLTPTKQCTQSCGTIGSYYNGDKVCEPCDPSCAACITKGPAKCTLCPPGKRLQYTDEGATQNGGSCVDECKPEGGASGCETCGATIGGTKYCSKCSTSTEVPVNGVCTADNARAAACKVKDGKGGCTTCESGYFLQDGGCYKLGRQPGEQICTAASSAGKCETCANSLQPNNGACPSCHSTCKTCRDANSANACTTCAAGYYMVGSAAGPCTSCDSNSGSVKGVAGCMSCAPPSSSTGSVLCYLMNGDSAGGSTNKSGLSTGAIAGISVAVIVVVGGLVGFLCWWFLCRGKA

SEQ ID NO: 124 - protein, 209 aa, Giardia intestinalis
MQFFMIFALAAASGRTISMRFSKRRRISTQAPLNGNCAANPRAAFCATITSGACTQCNEGYFLKDGGCYQTDRQPGKQVCSSAQGGTCQTCANGLQVQSGACGECHSTCATCSTADDPNKCKTCATGYYKTSDNDGPCMKCSEGLAGCRQCTASSTDAFMCLEMGDGTGDNTGGSTNKSSLSTGAIAGISVAVIVVVGGLVGFLCRRET

SEQ ID NO: 125 - protein, 499 aa, Giardia intestinalis
MQCDQSCLTCDGSGPNQCTSCPEGKYLKTDKSCVNNNGCTGNTYADPVTMTCKDSAITDCTTCEYNATVSKPQCTACNNNKKVKTAIDGTTTCVTVTSDCVDENHFKADDDSACYLCSDSSGSGNDQGKDNCKKCAKASGQPPVCSECLDGYFFNTNTKTCTDKCADNCATCSAETAEDKCLTCKAGFFLVEVAKPAGKCVPCDSKTDNGIEGCAECDNSTGSLKCTKCKPNRKPAGNQDNYTCTEKTCEDPTACGGTAGSCDATVIDNQGNAKHYCSYCGEANKFPIDGICVESSQKNGNNCNSHTCTSCAANYFLYMGGCYSTQKAPGSFMCSKADSSGICTEAASNKYFVVPGASNQNQSVLACGNPLGTLIGTGNTAKAYVGVDGCSRCTAPTALTTAGMTVAVCTSCDSSKKPNRDGSGCVLCSVSDCKSCVVDDVCGECVDGYSLDNGKCVSMSTNRSGLSTGAIAGISVAVIAVVGGLVGFLCWWFICRGKA

SEQ ID NO: 126 - protein, 427 aa, Giardia intestinalis
MKEDKTCALCSDVTDSTLGNEGKANCKTCTKTGSDNPTCSACLDGYFFDSGTSTCTDKCGDNCATCSVAGDPNKCETCKTGYFLVTTTDQQGKKCVPCDSVDDKGREGCSVCSNNGAFKCTDCKPNYRKEGSTGSVTCTKICEDDTACGGTSGACDAIVIDDKGVEHHYCSYCGEANTYPIDGKCNSAKANNQCDQGVCTQCTNNYFLYMGGCYKVDTVPGQHMCKTAANGVCTAVNANNRYFIVPGATNQNQSVLACENPLGTLVGTGDTSKAYVGVDGCSACTAPAAPSETGMTAAVCTACTNNNKPNLAGSGCFACTVDGCSHCGAGDKCEACTSKDQRPNTDGTKCIACNIDGCVRCSEENKCGQCGDDYRLEGEACVSTKPSGGNRSGLSTGAIAGISVAVIAVVGGLVGFLCWWFVCRGKA

SEQ ID NO: 127 - protein, 887 aa, Giardia intestinalis
MTCKASAITDCTTCEYNPATGGPKCTACNGAKIVKEEADGTTTCIDAGTCTQSGATGENFLSDGDAECILCSNDSSKTDNNKGSPGCGTCSKNGAKPECKTCLDGYYDSGNGNPAVCVACAGDCGKCGPGGAIDTCEKCKPGFFLKNDGAKKCVPCDDPTDGVPGCATCTLSGSFTCDSCKVNYQKKVGAGGAVTCEKTCEDPTACGGTSGACDAIVIDNTGKEHHYCSYCGKDSEFPINGLCVGNEKKEGNNCNNHTCTSCTTGYFLYMGGCYSVSTQPGKSMCKTAANGVCTAVNENNKYFLVPGASNAQQSVLACGNSLGTLVDPQGTAKAYVGVDGCSQCTAPTALTTAGMTVAVCTACDSGKKPNKGGSGCVTCSVGDCKSCVVDNICGECVDGFYFKAGDAPSCVSAEACTNEEGFFIDATEKKCTACADDNCAVCVAKEQQKCSLCKTSGTKKYLKKDGESTTGTCVDTAGCPATHYVDEEAKECNTCVSAGTTDCTTCEKGANGVVCKTCTTDTKTIFGLNRKSCVASCPANSTPKATGQDSQVCECNEGLQPNTESTECQPISNCNTEHCLECTSEGADKEVCTKCLSEYYLTPTSQCVSDCTTLKGYYGNDTDRKCKKCNDACVECKGEGADKCTACPAGRMLQYTDADTPANGGTCMNQCSVSSTNDGCAECGAQIGGTAYCSKCKNTQQAPLDGNCAANTRTRFCTTVSNGACTQCENNYFFKDGGCYQTDRQPGKQVCTTVQGGKCTKCASGLTADNGDCSNKRCHLSCETCTAANDANACATCSTGYYKPQSAGTKCNPCSEGLAGCRQCTVSSTGAFMCFVMGDGTGDNTGGSVNKSGLSTGAIAGISVAVIAVVGGLVGFLCWWFLCRGKA

SEQ ID NO: 128 - protein, 824 aa, Giardia intestinalis
MSRSLSVLLLVCLLAEFFSEEAPIYRNGFGYFCEGKIPNCLPNSCILGVTSRFLCTECESGYVPIDGKCVLAGDSKATRSGCAKSQTGGWCTKCGDDHFVFYGGCYNLSQDWTKFICERAEKGICVECAKTNETQPSVAFTNPSTSTPERCISCGDTVGFGGYSGIYGCLVCNSSRIKQEVVPNCYQCSDHKNTCSYDYRCKHITEGASNGLCGYCPETHIWSFYACYARDTPISNSICLPENIMEMSGQSLCSRCTNPSEIPLNGLCLSITGFEDICVKDPESGRCTSCKNEGNRQYFLFYGGCYLFKDVSDQIESQICQAVKENVCTACNSSTKEVFTKNNGCWRCGDSANGGIEGCQRCEMKDSSLQCLECRDLYLSLDKRSCLASCPKGQKGVQESSSSVHSCACDDESYLKDGKCVGCAVENCAECDESSCKKCKYGYTLSDSQCVATKCKDPNCDTCEDRDVCTKCTDGNSLDPHGLCVKDCLGSAGYYKATVGGVSRCVACTLGNCAVCESESKCKACRDGLYVEGSGGCKPCSSECATCSGPASGDCTSCPAKRRLQYSDGAKGSCVPQCVQDSSCAECGLTVGGTSYCSRCVKSTEYPNNGACTSSSSRAAGIACANVAAGRCVVCSSNSFRLNGGCYTSTLLPGKTVCTKASDGWCDSTVAGYGITYNGTLLTCPTNCAMCSGGACSACNSGFYLEKGACKACSKGCATCPHGEACFDCLAGYYFSESTCKACHKAISKCSLCVVPEGAVKPICLEYDNTSKKSALSSSAISGIAIGVVLVVGGVAAVLVWFFVFRKKAGVPLLYKQSIVASTH

SEQ ID NO: 129 - protein, 142 aa, Giardia intestinalis
MLVGFLLVCATVLAKDSGKTACVASNTNCASGLDTAGCKTCAGAEPDQTCLDCKVSGQNVQLDKRSCAVGCPLNSAANDQKVCVCDQGFSLNDGKTACVSSGTNKSNGLSTGAIAGIVVAAVIVIGGLVGFLCWWFLCRGKA

SEQ ID NO: 130 - protein, 636 aa, Giardia intestinalis
MLLVAFYFVLSALTAACQSDAQIAKCTQCVKISTSDTEICTECKAEGDVPINGVCTPKGDATVTTAGCKTDAGAEITTEKTCGQCDGAYFLHKNGCYAIGGDVGRLICADAAAAGRVSSKTPGVCEGCVVGYFKNPSAANNKDSCIACNDATGVVDGGNTYKGILNCATCQPPASAGAARQDKVAVCESCLEGFFVDSNGAACTACQDNNCAKCDAGAGKCTKCKATANKPYLKKGETEDSNTCVDKSGCNDNSHFTDDADDPTNGKMCKKCSEGIADCKTCALKDNPEGTILITCSACIAGTNQPNADGTKCVLCDIQDCIKCNEENMCEECTGGKSLSPLKNMCMEGCPAGTRDVSGICTNCHNSCAECDGDSEASCTACYPGLVLSKSNTGATGTCIPECTGRYAENCEAGQCTAVVGGSKYCSRCKAGFAPVDGVCVSTTTRAVTGCMPNDNNDGTCKACTTTYFLQSGGCYQSAAYPGSNLCSNAQNGKCTNCANGQQPEASTGSCPACASGCKTCEVANKEACKTCLPGYYLAGAKCVKCDTNDPNDGSHIVGVPNCVSCAPPTGGNGGPVTCYVKTDVTNDGGNDNNGGNTNKSGLSTGAIAGISVAVIVVVGGLVGFLCWWFICRGKA

SEQ ID NO: 131 - protein, 699 aa, Giardia intestinalis
MLLLAPCLLISALAASCSGPTASKCKDGECDMIGKTEVCTQCKTETDHLIDGECVPAGTDQAAAKCASPAQGKCGSCGDGYFMYKGGCYEFAGELGGLICADPAGGATVGKVTGVCKDCVEGFFKSPVAAANKQSCISCNDTTGADQYQGVDQCKTCNPPSNTGPATCTACDEGYFGAGTTTCIACGDENCATCTEATTTKKCSKCKATGKMYLKKESGSLTGICVEGNQCSTDSTLYPDDTEPKSCKPCTAGTFENCKTCTKSDTSVTCTACKENMVFGLGKKSCISSCPDNSEAKTENTCTCNDGFKLNEEETQCVPNDSPSNPCSTQDCKACSGAQTNKEICTECLSNKYLTPTNQCIDHCEYILGYYSSTEGNKRVCKKCEVANCLACSENGGCGLCKDGFYGEACSPCDSSCKTCSGNTANDCTSCKSGSTLTYGSTGNTGTCGAECAAGTGTGKCRECGLTVEGTKYCSVCSQNNEYPQNGVCAVKASRTDKCKDGSITGGVCNVCADGFFKMNGGCYSTSQLPGSTVCLSAQSTGGICKTPEEGFSLTGESLVTCYTGCAECTTTKDCSRCMDGYVKVGSACTKCHESCYTCEAGATTCKVCAPGYYKESSSNGPCRKCSEGLAGCRQCATPVNGKFICFETDDNTGDNTGGSTNKSGLSTGAIAGISVAVIVVVGGLVGFLCWWFICRGKA

SEQ ID NO: 132 - protein, 102 aa, Giardia intestinalis
MQRAATTCKVCATGYYKTVLGEGACTFCEGNSNGVTGINGCVSCAPPSGNTGPVLCYLMKDSRNTNKSGLSTGAIAGIVVAVVIVEGLVGFLCRWFLCRSKA

SEQ ID NO: 133 - protein, 95 aa, Giardia intestinalis
MASGYYIDGSINLVVCSDGCAKCTTSSTCTTCKDGYAKIGSSQTCTKCDSSCETCNGQLQRVRYVRQDTTRLYWEKARAHSAKVIAMGSLVSMAA

SEQ ID NO: 134 - protein, 71 aa, Giardia intestinalis
MCALVTSQSGAALITCTTYVVGYKLSADETKCEAASNCKTPGCKTCNNEGKENEVCTEYASGNYLTRRASA

SEQ ID NO: 135 - protein, 72 aa, Giardia intestinalis
MFGRLLLASAVLQLTWAACEANGLGGAGSCKTCGATIGGSEYCSECNDGANYAPVDGICANAGQTPASTLCP

SEQ ID NO: 136 - protein, 400 aa, Giardia intestinalis
MLLSEAHKQHVNRAPMLLPALCFLMSGLAAQRTKQPAPSCQVDNCEQCNADNVHCDRCVPSDDTKCERCNEGFTVSDDKTVCNQSPAQCNTPNCKTCDNPKTDNEICTKCNDGDYLTPTNQCVPDCTAISGYYGDTDKKCKACNPECAECVGPANNQCTACPVGKMLQYTDTNTPVNGGTCMDQCSVSSTNDGCAECGAQIGGTAYCSKCKNTQQAPLNGNCAASSRVAFCATITSGACTKCNEGYFLKDGGCYQTDRQPGKQVCSNAQGGNGKCQTCANGLAASDGNCAECHSTCATCSTADAADKCKTCATGYYKENGDDTTAGLCKKCSEKISGCKQCVSSSGSSVICLESEVGTGGSVNKSGLSTGAIAGISVAVIVIVGGLVGFLCWWFLCRGKA

SEQ ID NO: 137 - protein, 128 aa, Giardia intestinalis
MAAAICTSCDNSKKPNKDGSGCFTCTIDGCSHCNRDNMCEACSDGKKVSPGRKSCVDKCPSNSTDTDSVCVCNDGYSPDSSGTSCASSGTNRSGLSTGAIAGISVAVVVVVGGLVGFLCWWFICRGKA

SEQ ID NO: 138 - protein, 438 aa, Giardia intestinalis
MYVIDSKSGMLQVPVAVFTSWTQAHINRLMFEKILLGIAILQMARASTCQAQSGGDPGTCEKCDALIGQTKYCSKCNGANYAPVNGACEDVETQEDKKALCKAHASGACTTCGGASFMYKDGCYSKDTEPGQSMCTQASEGKCTEAAPGYFAPVGAANTEQSVVACGDTTGVTIAAGGNTYKGIADCAECGAPDATAGAEAGKVATCTKCGVSKYLKDNTCVDKAQCDSGNTNKLVAVDDPENGNKCVSCSDNLNGGVANCDTCSYDEQSKKIKCTKCTDNNYLKTTSEGTSCVQKDQCKDGFFPKDDSSAGNKCLPCNDSTDGIANCATCALVSGRSGAALVTCSACIDGKRPNKEGAACFECNMEGCVYCSGANKCEECSDGFKLEGDKCVSSGSAGVNKSGLSTGAIAGISVAVIAVVAGLVGFLCWWFVCRGKA

SEQ ID NO: 139 - protein, 620 aa, Giardia intestinalis
MLVVELLFVLNVLAANCAGGTRNSRATGNQCGTIEGISSPMECAEGHALDEAANACRAPPSFQCEVDKLVTIGSAQACTQCKQGFAPIDGVCTAFGDDLVTKTAKCTQSGGAAIEGTDTSCGKCGGDGYFLFMGGCYKTGASPGELICTNAVGGVCAACKADGSVFQNKASVKTPGSECILCSDSVGADSNKGVANCAACDAPTGDTGTAKCKACAEGHALDEAANACRAPPSFQCEVDKLVTIGSAQACTQCKQGFAPIDGVCTAFGDDLVTKTAKCTQSGGAAIEGTDTSCGKCGGDGYFLFMGGCYKTGASPGELICTNAVGGVCAACKADGSVFQNKASVKTPGSECILCSDSVGADSNKGVANCAACDAPTGDTGTAKCKACAEGHALDEAANACRAPPSFQCEVDKLVTIGSAQACTQCKQGFAPIDGVCTAFGDDLVTKTAKCTQSGGAAIEGTDTSCGKCGGDGYFLFMGGCYKTGASPGELICTNAVGGVCAACKADGSVFQNKASVKTPGSECILCSDSVGADSNKGVANCAACDAPTGDTGTAKCKACAEGHALDEAANACVSSGGAGGSVNKGGLSTGAIAGITVAVVVVVGGLAGFLCWWFICRGKA

SEQ ID NO: 140 - protein, 680 aa, Giardia intestinalis
MFQLIPLFVASALMAACQPDGNHTATCAQNKCETVGSAEICTECRAGGVPVDGFCRPPGSPQAAAAGCTQADGTALDKTATTCEKCGDGYFLFMGGCYKTTDGPGSEICTAASNGVCTTCKADNGLFKNPATAPEKGRECILCHDATGADGYMGVEGCATCTAPTNNKGAATCTECQDGYYNDGGACKKCVDGCIDCTGANQCTTCEDGKYLKNNQCVDAGQCDQGTYADPTTGQCKPCGITDCATCEYNATISQPQCKTCSTSSNKMVKTAADGTTTCVDDGGCTNGNTHFVEGTNQKLCVPCGDTTNGGVLGCSTCSSKTTCTKCLDGYYDNDDSQDTATCVACGGQNCETCAKATSDKCTTCKPGFFLKDSSSGECISCSDTANGGREGCSVCSNDSGFKCTDCKPNYKKQLNGGADDDYTCVKTCEDDTACGGTSGACDAIVINENGKELHYCSYCGDNSKYPIDGKCTNVNAGNTGCTNNVCKSCTAGYFLYMGGCYKIGAEPGNLMCKTAEGGKCTAVNANNRYFVVPEAQATDQSVLACGNPLGTLVGTDSTSKAYVGVDGCSQCTAPVALTEAGMAAATCTSCDSDKVPNKDGTGCVLCSVGDCKHCVVDDVCGECSDGYSLDSSGASCVSSSSNRSGLSTGAIAGISVAVIAVVGGLVGFLCWWFLCRGKA

SEQ ID NO: 141 - protein, 651 aa, Giardia intestinalis
MLYSDSDSAMWCGGDSDSMRLLFMGGCYNKDAHPGSEICTKAEGGLCTACNTANGLFKNPVTPSEKGSECILCSDTTDRNGVMGVAGCSECSHTGTSGPATCTECQAGFVTKDSACVKCGDGCSACSADTPTQCTACVEGKYLKDGNTCVDAGGCGADKYADKKTWTCKACDPDIAGCTACEYNDATGKPRCTNCGTNKTPRTTLDGTSTCVTKDYAGCQGADNGLFMTEDNVCRLCSDPAASDSEPKNKGIAGCKTCTKQQSQKPECIECLEGYIKEGNGPAATCEACGANCATCSEKADKTKCQTCKTGFFLKVSSTPGECFACDDTNNGGIEGCSQCTMEASTFKCTDCKVNYRKQSGTSPVTCTKVCEDDTACGGTSGACDAMIIDDQGTTKHYCSYCGDSSKYPIDGLCASEAQSNTCNNHVCESCTTGYFLYMGGCYSTQKAPGSFMCKTAGNTGICTEAANNRYFVVPGASNTDQSVLACSNPLGTLTGTGDTAKAYVGVDGCSQCTAPTPLTGAGMAPAVCTACSGTNKPNLAGSGCFACAVEGCSHCNRDNMCEKCDNNKKVSPGRKSCVDGCPSNSTDTDSVCVCNDGYSPDDAGASCVSSGANRSGLSTGAIAGISVAVIAVVGGLVGFLCWWFLCRGKA

SEQ ID NO: 142 - protein, 628 aa, Giardia intestinalis
MLLVVFYFVLSALAGACTVEANTRDCTENKCEMVGETEICTQCKTGGNVPIDGVCKAVAEAANKCTKSDDNPVGAGDTTCGKCVNAYFMYKGGCYLAGAAGPGTGTKMCKQAAGGKCTQAADAKNYFIPPANTDDTHDSVVWCGDEIGVTLSSTQYKGVAKCLVCDAPGGAGAATCTTCEDGYFGATCKKCHESCRTCEAAEENKCKSCTDGYFLGATNGAAGKCLKCNSKTEEGWHGVDNCAKCTSSNTQNTPATCTECVANFYLKPAAGATPSSCVTETGCGDGYFPTIVDEIKKCIACGTAANGGIDDCKKCSLKTTSAKAGIEIVCTECNTKWLSPLGDACLDSCPPGTHADSGNICPLCHSTCAECDGNAEATSCRACYPGFVLSYGSDKVRGTCIQECTGKYAENCEENMCTAVLGGSKYCSKCKAGFVPIDGVCVSTASRAVTGCTPGNGVCIACTDSYFLQSGGCYQSTVFPGNKLCTLASNGKCTACSNGQTADGQGSCPACNAICATCAAGNIDQCQTCFPGYYKSGTKCVKCSITDNGITGVENCISCAPPAGNSGPVTCYMKTDDTNDGGNDNNGGSTNKSGLSTGAIAGISVAVIVVVGGLIGFLCWWFICRGKA

SEQ ID NO: 143 - protein, 56 aa, Giardia intestinalis
MKTDDTNDGGNDNNGGSTNKSGLSTGAIAGISVAVIVVVGGLIGFLCWWFICRGKA

SEQ ID NO: 144 - protein, 721 aa, Giardia intestinalis
MFEKILFTNCILQLAWIIQTVAGACTPGETGPTKCKTCDAIIGTDSYCSECDQAGEGPINGVCTSELSGNTCANKICTQCVKNYFLYKGGCYKFAESPGNIICEDAIDAAGGTDGVCTTCKAANGFFKHPAPAETKQSCIACNETAGVVDSDTTYKGTSNCLKCDPPAAAIGARADKMAVCTLCDQTKYLKESACVEKAGCGANMFGKPSVQDGNKCIACGDSNAGIEGCAECTAPDEPTIKPTCTKCTGNNYLKTTSEGTSCVQKEQCNGAYFPNDSVDGKKQCVSCGDATNKGITDCTACNLLSSPLETVLIKCSACRSGKKPNEDGSACVDAPGPSPEECSIEGCQICSDDKKTCDKCQSNNYLTPTKLCISDCKKLGNYYLATEQTTGSCRECAMVNCKECTENGKCGICNDGFYLLNEECKPCNDSCKTCEGGVESDKCTSCKSGSALIYAGNGNTGTCSLGCIPKSSADPGSCKTCDLAIDGTKYCSVCNVDKEYPQNGACAGIKARASSCQDGNVNNGVCSKCETGFFLMNGGCYEITKYPGKTVCSKTAADGTCETPATGFSLSSNTLKACFEGCAKCATGDDCSECISGYVSGSTPNSCEKCSTGCATCYPTATTCTSCLAGYYQSGPKCIACDKDDSTIKGISNCLNCAPPSSGSGSVLCYLMKGADNNGGSTNKSGLSTGAIAGISVAVIVVVGGLVGFLCWWFVCRGKA

SEQ ID NO: 145 - protein, 205 aa, Giardia intestinalis
MLSVIPLICTIVLAKNMAKATDCNPPIDGCSTCTGTGDGQTCTGCTAGDQKVQPNGKGCIAGCPPNSDDVGGICTCKSTHKPSDNGQTCVPKTDCNPPIDGCSTCTGTGDGQTCTGCTAGDQKVQPNGKGCIAGCPPNSDDVGGICTCKSTHKPSDNGQTCVPSNTNKSSGLSTGAIAGIAVAAVIVVGGLVGFLCWWFLCRGKA

SEQ ID NO: 146 - protein, 674 aa, Giardia intestinalis
MLVGFLLVFTVTQAHRTSVSTDCPIVNCQTCSQDKQTCVACKQGFVPNEGNTECNSAPAECPIVNCQTCSQDKQTCVACKQGFVPNEGNTECNSAPAECPIVNCQTCSQDKQTCVACKQGFVPNEGNTECNSAPAECPIVNCQTCSQDKQTCVACKQGFVPNEGNTECNSAPAECLIVNCQTCSQDKQTCVACKQGFVPNEGNTECNSAPAECPIVNCQTCSQDKQTCVACKQGFVPNEGNTECNSAPAECPIVNCQTCSQDKQTCVACKQGFVPNEGNTECNSAPAECPIVNCQTCSQDKQTCVACKQGFVPNEGNTECNSAPAECLIVNCQTCSQDKQTCVACKQGFVPNEGNTECNSAPAECPIVNCQTCSQDKQTCDACEPGKHLTPTKKACLTDCPAGTYLSGQTCAPCDPSCAECSGAGASRCTACPAGKMLRYADESKLNEGGQCVEQCVEGPECETCGLTIGGTKYCSKCKGNNVPLNGVCTSNAARTQFCTTAADGACTVCAAGYFVQGGGCYEITRQPGKQVCALTDNKGKCQTCTNSLGPDGAGTCPSCDPTCKTCSAANAANTCTTCATGYYKIALEGACTSCENDSNGITGVKGCLNCAPPPSNTGPVLCYLMKDGDSTGGNVNKSGLSTGAIAGISVAVIVIVGGLVGFLCWWFICRGKA

SEQ ID NO: 147 - protein, 99 aa, Giardia intestinalis
MDNKCSACTEGGKRPNTDGSQCIACSIDGCIRCSEENKCGQCGDDYRLEGEACVSTKPSGGSRSGLSTGAIAGISVAVVVVVAGLVGFLCWWFICRGKA

SEQ ID NO: 148 - protein, 344 aa, Giardia intestinalis
MGGPAVKAAAETLGGACTEVTEGSESTEVSCRCVCKPTFYNSSGTCISCTDSCAVCKDGTLTGCQQCSPGKILSFSIVSSESADCVDQCSVSSECAECGITIDGSRYCTRCKDASTYPFNGVCILNTQRDAYCTSKANGVCTTCSSGAFLMNGGCYTTEHYPGSTICGKQSNGKCEKTKEGYGISPDGKLLECDPTCLACTAPGPGRCTRCPSGALLKRASGAATGSCVGLNACVDGYYADGDACLPCATPGCKTCGHASFCTECAGELFVSLDGRSCLGECTGNKVVGEVPGGVRRCWCERGFYSHGPRVARINPPPRSCVKTGTNQARSTSVTGSPSSPQSV

SEQ ID NO: 149 - protein, 216 aa, Giardia intestinalis
MGGCYSTQKAPGSHMCKTAEGGRCTAPSENSRYFLVPGASNTDQSVLACENPLGTVIGAGSTAKAYVGVYGCTACTAPAALEAPGMAPATCTACSGNNKPNLAGSGCFTCTIDGCSHCGAGGKCEACTSKDQRPNTDGTKCIPCSIDGCVRCSEENKCGQCGDDYSLEGDKCVSSGANKSSGLSTGAIAGISVAVVVVVAGLVGFLCWWFICRGKA

SEQ ID NO: 150 - protein, 256 aa, Giardia intestinalis
MHREDLRGPHGLWGTAGSCDAIVIDDQGTTKHYCSYCGDSSQAPIDGLCASEAQKAGNTCANGVCTQCTNNYFLYMGGCYSTQKAPGSFMCKTAGNTGICTEAANNRYFVVPGASNTDQSVLACSNPLGTLVGTDSTAKAYVGVYGCSRCTAPTALTTAGMTAAVCTSCDNSKVPNKDGTGCVTCSDTNCKSCVMDNICGECVDGYSLEGGKCVSSGANRGGLSTGAIAGISVAVVVVVGGLIGFLCWWFICRGKA

SEQ ID NO: 151 - protein, 96 aa, Giardia intestinalis
MTPAVCTSCDSDKKPNKDGSGCVVCSDTNCKSCVVDGVCGECNSGFSLDNGKCVSSGANRSGLSAGAIAGISVAVVAVVGGLVGFLCWWFVCRGKA

SEQ ID NO: 152 - protein, 1615 aa, Giardia intestinalis
MLKVSLMLAVGLAAPCGDTGYECGDHGTCTLIGEVYRCVCAPGWTGYDCSSCSRGFVNLVENCIPPSCIEDGLECGGRGTCLYLKSKNAWECGSCPVGFYQYSGRCVSSYCYGDEEAGGVTTERPCSGQGICIFNGASEADRVRPDVYICSCNLIHTGSQCQNCDPRFGKIDPLLRACVAMSCYDGEDTEPCQGRGECVENIQQHPFTGELTTGYICRCGYPYQLVGTAKCLPLNCVSTQAGVATECGTGGVCESSGSQFSCRCLSGFVQLTDGHCTAPACRQNDGALACSDIGACVSGGEDPTNPNTYYCQCPMSYSSGDYCEVCDNQRGTTINGKCVAKSCVADNTVCSNNGDCVLEGLFAYRCKCHEGYEAHGTNVCAKPGCWDSIVNKTCSGAGQCTSNGCQCNSGFTLRSMRCIPTKLISGSWVCSGNGTATISSSSADASKPENWICQCDGVTKGTLCNECNTERRPPAAYMINDACTAAACVSDSTTSPPTICNGVQGATCSQYGVDADSVFYCKTPDKSQYLVAYNSSLVVHRGCTYPSKTEYPLNLYCGLLDGHTMYIDDPGAPQCLSALTSTCSCEDPFNFVTVEDAIKSELGDVQYRTSCIHKACLNPDLKGTTDETVLQNPDSYCNGLGDCLQDDHGDYTCFCGPGSTYFKGTCVSNACLTQDPETDATVMCGGLGICALDTYGYWGCVCEYPYFGSGSSCYPIGCGYHDPLDRTTVLCGGEGRGTCVANETHPELATCACNRGFTLINSNYCAPSACTAYGADREGVEPSLSYVCSGIGDCFYNPVTGSYECHCGEGYYATGPYCTLAQCIVVIDAGEAIPGLIGNLYLECGFAGAGTCTSDGCTCNSGYVKTASLSMCVRAGCIDENNVYCGGDHHAACVDKGDGTGFSCVCTAQHVNVNGTCVPKKCVTRDVNGNNVVCGGRGQCIQMWTGYMCACDNNTPAVPSGDSYTCPHPDCCGQVGEDMVVCSDQGSCKETTTGGFCVCNNGYSLVGKSQCIVSECVQTDGNGVTSICGGGECIATNDVHSCACANGFSNVDGRCVHSNCIDTYDGEQIECSGFGKCTAVDSSYKCVCNLGYSPGTEPNRCFSVMCLSTIGDKGYECGGHGKCTYSEEQEEFSCTCESGYKNIDDTSAGYSITYFCVTSGCTTTSEAGQTVCNGGGMCDPTSGRCVCNEGHAGDTCADCADGYIRPPEEYIFKHCMKTTCADSTCGGTGMCVPSLLYNQMVCECADHHTPLDGRCVPCAIDNCETCDVSQLGRACSLCQDGTYLSGDQTQCLPCHADCKTCQGPQSTQCLSCVEGKVHSLNGMGASGCKEECRINVDGCKSCGAMISKTKYCSQCQSQTSVPVNGECKSQATRASECSRYSKGACLACADGYFLYEGGCYETSKLPGRDVCSMASSGSCSYCKIGYSNLAGTCTACKNENCASCNIVTTCDECKPGWSLVNGECVSCAAECESCTQGSPSTCKSCKDEYFASFSFSGDASGPCRPCSDTTPMDGIVGVPGCKYCTLPLTNGTNENPVSVICLTTESAGKMMSTGAIAGITIAVLVVVGGSVAGVLVWFFLFRNRKGPMKKSPRRRFHPDETSTSLLSQDYGSSML

SEQ ID NO: 153 - protein, 348 aa, Giardia intestinalis
MKEDKTKCFGSCLALGPGYYNASGTCARCVENCLSCVDGTSCSRCADGYYLEVSGSDSSTGACRPCAAGCSTCNNGSSTGCTTCLLGYYIAAEGKRQPGQCVKCDSDGNGYVGVQHCIVCRSTVGDGGAKNVVCQKCEDGYLKETDQGKTVCEAPPPTCTVELCALCVADDPNRCEHCTAGAYLCPRTAACTKDCASCGGSMYPDEDLGECQPCDIANCRVCATGLKCESCAENAVPISPDVYHTACMGCSDTGGMDGWVGLAGCTTCELTDKGGGSVNCLDPGYYRRGGLGGGAIAAIVIVVLLVLAVAGFLVWWFVFRRGGRPRRGGTKYTSLMRGESYDYRQSLI

SEQ ID NO: 154 - protein, 801 aa, Giardia intestinalis
MLITCKSDANRRRCAFGMCLNLGPAELCLKCTPGLLLIDGACVEQDSHEVGSAGCEVDPDSYACLSCSSSGYHVYSGGCFSAASGVLELVEPSRDSTLTCEEVISFNMFHTAPGKCKQKHCNVDLGGNKYCSRCSVKSEYLVDGKCLSSTDNNACTSQDYPDGTCKLCGNGYFLYKGGCYSITHGAPGNLICKEVDTIPGVCKLCQDGFFRLPEPAANRQSCMLCNDTSEYEYDDLDSYYEVRTFAGVEGCAKCSFKEEVTILLNKPVCEACHPDYYLLSRGDSAMCLSSQECTSSHFRKTVDEVNLCIFCGDASRGGLDGCSRCTYTANTGAITCESCFLYYYKKVDNGVLSCVPLDECTAPYYPKDSEDPGDLWDKQCLLCSDTNNNGIQDCTACTYTSTGLKCTACSGTKRPNAAGSTCYDCNIANCEECSSDTVCSRCAAGYIISSSACVADPDPCSVAGCKTCVSGNRQLCLVCHDGFYKDGTTCRKCAAGCTVCSGAGAQCTSCEQDRFLLRSESSSSGSCVVACGDGHFEDTTLKVCTRCSDAHCKRCAGPGVCTRCQDDMYLKLTSSSIECVSSHHCYTGSFPQENPDTGNKCVPCGDNLVGISNCIECTLDGGLLSCLKCKSGSFLDLFRRTCITQCPQNSSPKEENRAMACMCEDSYAPSNDGTLCEPTKPCPQYQGCAMCDSLDRCVRCVDPLDNIQLDSTTCQRSCPSGAAVRRGKCHCMGGQVPSGNTCVDPPKKSVSKMSTGMIAGISVASVAIVAVIIGCLVWFLLRRKNSGSLNREPSLFRPLSS

SEQ ID NO: 155 - protein, 581 aa, Giardia intestinalis
MTNRSSRAAMLLLVLCFLMSAFTAQRTKQPTSDCGVANCAQCVSGDNTKCETCSPGFDLSNDKTQCNQRPASNCGVANCAQCVSGDNTKCETCSPGFDLSNDKTQCNQRPASNCGVANCAQCVSGDNTKCETCSPGFDLSNDKTQCNQRPASNCGVANCAQCVSGDNTKCETCSPGFDLSNDKTQCNQRPASNCGVANCAQCVSGDNTKCETCSPGFDLDENTKQCNQSPASNCGVANCAQCVSGDNTKCETCSPGFDLDENTKQCNQSPASNCGVANCAQCVSGDNTKCTKCQSNYFLTPEKNACLTSCPAGSYAVGQTCAPCDSSCAECSGAGASKCTACPAGKMLRYADESKLNEGGQCVEQCVEGPECETCGLTIGGTKYCSKCKGSNVPLNGVCTSNAARTLFCTTAANGACTACAAGYFIQEGGCYKTDRLPGKSICTTDNGGKCQTCANGQTPDGGTGVCPLCDSTCKTCAAGQTQQCQTCFSGYYKSGTKCVKCDASDGQITGVTDCVSCAPPSTNQGPVTCYVKMDGSSGGSSTNKSGLSTGAIAGISVAVIVVVGGLVGFLCWWFICRGKA

SEQ ID NO: 156 - protein, 748 aa, Giardia intestinalis
MFQLIPLFVASALMAACQPDGNHTATCAQNKCETVGATEICTQCRAGGVPVDGFCWPPGSPQAAAAGCTEEDGATLDKTATTCGKCGDGYFLFMGGCYKVGQDPGSEICTKASDGVCTTCKTDNGLFKNPATAPKPGSECILCSDIKGADGYTGVENCAQCTKSDSNKGAATCTECQDGYYKDAKGACVQCQGNCATCETSATQCTSCKAGFYLKDGNSCVAEGECTNTVYPDPESGKCKACSTITDCTECSFDKATGKPQCTACGSQKTPRTTLDGTSTCVDKTLDGCKGADGALFMKDDTTCALCGDASPGAGANDKGIAGCKTCTKQQSQKPECTSCLDGYFFEQSSKTCSACASNCATCTSADVSTCTECLPGYFLKTEGETKCAACDSTPDGGREGCSLCSSNGGFKCTECKPNYKKQSNGGAGDDYTCTKTCEDETACGGTAGACDAIVVGNDGSMLSYCSKCVGAGYGPINGKCTNALAGNTCADGVCTRCTNNYFLYMGGCYDVSKAPGNLMCSAAPSGFCTTPVGRYFKIPGDSAAQQSVLACGNPVGATAGDKAYVGVLDCTACAAPQAPAANAMAAAVCSACDKTKKPNKDGSGCTLCAVGGCKSCAIDGMCEVCAEDNKKPNMAGSTCYVCPAQGCSHCSADNKCEACTNKDQRPSLDGTQCIVCDIERCMRCSAEGVCGECEEGYVPRDGMCVSSGTNRSGLSTGAIAGISVAVVVVVGGLVGFLCWWFICRGKA

SEQ ID NO: 157 - protein, 812 aa, Giardia intestinalis
MLSMSRSLSVLLLVCLLAEFFSEEAPIYRNGFGYFCEGKIPNCLPNSCILGVISQFLCTECESGYVPIDGKCVLAGDSKATRSGCAKSQTGGWCTKCGDDHFVFYGGCYNLSQDWTKFICERAEKGICVECAKANGMRPSAVLTNPNTSAPERCISCGDTVGFGGYSGIYGCLVCNSSRIKQEVVPNCYQCSDHKNTCSYDYRCKHITEGASNGLCGYCPETHIWSFYACYARDTPISNSICLPENIMEMSGQALCSRCTNPLEIPLNGLCLSITEFEDICVKDPESGRCTSCKNEGKRQYFLFYGGCYLFKDVSGRIESQICQAMQGNVCTTCNSSTKEVFTKNNGCWRCGDSANGGIEGCQRCEMKDSGLQCLECRDLYLSLDKRSCLASCPKGQKGIQGSSSSIHICTCDDGSYLKDGKCVGCAVENCAECDESSCKRCKYGYTLSGSQCVATKCKDPNCDTCEDRDVCTKCTDDNSLDLHGLCVKDCLGSAGYYKATVGGVSRCVACTLGNCAVCESESKCKTCRDGFYVEGSGGCKPCSSECATCSGPASDDCTSCPVRKRLEYSDGAKGSCVPQCVQDSSCAECGLTVGGTSYCSRCVKSTEYPNNGACTSSSSRAAGIACANVAAGRCALCSSNSFSLNGGCYTSTLLPGKTVCTKASDGWCDSTVAGYGITYNGTLLTCPTNCATCSGGVCSACNSGFYLEKGACKACSKGCATCPHGEACFDCLAGYYFSESTCKACHKVISKCSLCVVPEGAATPICLEYDNTSKKSALSSGAISGIAIGVVLVVGGVAAVLVWFFVFRKKN

SEQ ID NO: 158 - protein, 128 aa, Giardia intestinalis
MLLVLLASCIAVQAAVCAPALIGAGCATCTGENDGQTCLTCNPQENKVQPGGKKCGVGCPANSTPKESVCECNGGYRPNAQGQCEPSNTNKSSGLSTGAIAGIAVAAVIVVGGLVGFLCWWFICRGKA

SEQ ID NO: 159 - protein, 722 aa, Giardia intestinalis
MMTSLHTSLAMILVTVIIKASIVAGCTSDSDCGGVSGSCTISINDLKYCSKCATEKVPINGRCVSANDAQGNVCSAAGCTRCTKGYFLHYGSCFNISTDSAGSLVCDFVDDENEQLVDGYCTQCNQDGYTDNPKKSSTTQSCIACFESDGTSGCNLCTAIPDDGSTGGFVVICHGCADRDKVAIDNKCVPIGGVEDALSGCVHSTSSGSTYCNRCGAGFLQFASTCLLANGNYAPKICEVSNQIHVADTICCKQCKNTGLAIIDGDCSDFNLMCTCSGGRCTQCAEKKFVYHYGGCYHRYSTLARSICSGDVDVGGRCLQCNTSTASGLFTNPTASDMQACVSCSDTARQGIANCVECSYAQSTLTCTKCSDGSVPQNNHCNAVTPPGPPEGDCSILACKTCNTTDTTRCAVCHMRTYLALDNKTCVSNCSTQNSDDNHYYGDSATGACEKCHSSCRACVGPGENQCTDCVPEQYVPGSVGNCIACSSTQSGSTFTGIPNCIRCYKGGYTTTELKCSACTTGMVPNFNQVHCISSTSCSMKNCELCQTDPSTCDRCQENFFLAPDGSCVSDCATLGPYIGNTQTRKCIHCGEGCMSCNSDLYCTSCQSTYAIVNNRYCFKCDSTDSGSLIMGVPNCTKCKAPSTGHGPVHCLEYSTQPQNETGSRSNATGIAVGVTIAILAIAGVIGFLVWWFVCKKKTNKVNMPPKLSSNSSIVSSRIGLM

SEQ ID NO: 160 - protein, 817 aa, Giardia intestinalis
MLGLPALLLLASSCGASTYTYHNNFGVECNKHRDSCAQNRCVFMGWEELCTQCVSGYVPINGKCQLLDDSSTCVPDDTSSPTRCVECKSEQNVFLFYGGCYTIDQSTIGSEICRQATSSRCTECNVSTTEKYVFTNPDTSAAERCILCSDTVGFGGYRGASDCLYCIQPIKGEIGTALCTKCSYTKQNNGIGPVDYQCQAKGLHNCVNGYCTSCYKTHLFYEYGCYSRHSSTGFAICAEANQYELDNVTICTECVNTSHAPKNGGCTLVGESASRSLFSDCTKDASRGLCTDCSSTGKSFLFYGGCYNRDSHVGSKLCLEAAGGVCKQWRSNFNFTFSKAEGGDRYLCGDTSSGVRGCATCGYNNGVTCTRCSTGYLGVDGRSCSEGCSGDTQGVCTKVAEGSESTEVSCRCVCKPTFYNSSGTCTPCTDSCAVCKDGTPTGCQQCSPGKILESLVVADDNAKCVDECAVGDDCAECGITIDGSRYCTRCKDSNMYPLNGVCIPNTQKDAYCTSTANGTCTTCSGAAFLMNGGCYTKAHYPGSTICDKQSGGKCTTTKEGYGISPDGKLLECDPTCLACTAPGPGRCTRCPSDKLLKKASGAATGGCVDPGACVDGYYAYGDACLPCATPGCKTCGHASFCTECAGELFVSLDGQSCLEECTGDKVVGEVSGGVRRCWCERGFLPALDRSGCVLPTECPSGMPSCAACDESGRCLLCATSGHNVQVDQRTCAEGCGARASSNQGVCMCELDAVLTKGICAPVKTLTKKKLVAIAAGTTMAVLVVGVLVGFLCWWFIFRGRRIDASPSTMTLISSKSM

SEQ ID NO: 161 - protein, 181 aa, Giardia intestinalis
MGGCYKVGQEPGSFMCKASSSNGICTEAASNKYFLVPGASNTDQSVLACSNPLGTLTGTGDTAKAYVGVDGCSQCTAPTALTEGGMAAAVCTSCDSDRKPNRDGSGCVLCSVGGCKSCVMDNICGECNSGFSLDNGKCVSSGTNRSGLSTGAIAGISVAVVVVVGGLVGFLCWWFICRGKA

SEQ ID NO: 162 - protein, 693 aa, Giardia intestinalis
MAGAGATAEDPLMFQLIPLFMASALMAPCQPDGNHLTTCAHEKCETVGSAEICTECKVGGVPVDGFCRPFGSIQAAAAGCTKADGAALDKMTATCEKCGDGYFLFMGGCYKTSLWSEVCTAASNGVCTTCNTKNGLFKNPAATVTPGNECILCSDATDRNGVMGVENCLKCTAPGGNTGAAACTACKAGFYGSGPCTKCHDDCATCSGAANNQCTSCKAGKYLKTDTNTCVDAGSCNGNTYADPVTRTCKDSAITDCTTCEYNPATGGPKCTACGNSKKVKTAIDGATTCVTVASECVDENHFKDDGNTMCVLCSDTSGSDPNKGVAQCKTCTKNGANKPECKTCLEGYVLKGSGADAICESCGNNCAVCTAANDISTCTGCLPGYFLKAEGGTKECVPCDDTAKGGREGCSLCSSNGGFKCTDCKANYRKQSNGDAGDDYTCVKTCEDPTVCGGTSGACDAIVIDANGKEHYYCSYCGETNKFPIDGLCTDNKGTNAGCTDHTCSYCAAGFFLYMGGCYKIDTVPGSYMCSKSTTAGVCDTPNANNRFFVVPKAISAEQSVLACGNPLGTIAGGNAYVGVEGCSQCTAPDARADGGMAVATCTACEDGKKPGKSGTGCVACPDANCKSCTMDDVCEECADGFSLDNGKCVSSGTNKSGLSTGAIAGISVAAIVVVGGLVGFLCWWFICRGKA

SEQ ID NO: 163 - protein, 865 aa, Giardia intestinalis
MLCRAAGVALAVVGGPLMGPLKALDRYWAVLSQCTCGSFGSHWMVRRDCNGATRCTSMTSTLRQSQFYSAQSTSFWPCAEIADCRVVFAIDPVSVDSISACGQRVSEGSINCINRRGLTDVPRVCSYQSINRAMFGSFVLAGVLVQIAWAEKVAERAAQCADNTNCAAEACNVLIDGKLYCSKCKTELVGHAPVNGVCADVSSSKEICKINAEGKCTECAGQSFMYKGGCYQTSQAPGSSMCQAADAGKCTTAPESKAYFVVPEVDRKPTGQTVVSCGDATGVTLADKTYKGVDGCTKCEAPAPADASGAKAATCTACQADKYLKTTTDSATSCVTEKECTDAAGFFVDTTGGKKCSKCDPGCKTCKTEAAKCTSCKDDKPYLKKDAGDTGTCVTEADCKNGNTHYADDTEPKTCKTCAEGTSDGCATCEKSADGAVACKTCGNQKKVQPNKKGCIAKCPETVSAEKDGVCECVEGYVPDNAGTGCTKKSDPQCNTPGCKTCSEPKTSKEVCTECEDAKALTPTGQCIDNCGDLGGYYAGTNEGGKKACKKCEVENCLLCNGQGQCETCKDGYYKSGAACAKCDTSCKTCANGNSNGCTSCESSKALSYEGEGTGTCKPGCEPNANNCEKCELTVDGTAYCSKCKDASQFPQNGVCSAAAGKAITCTTQRDGVCNKCANGFLRMNGGCYETTKFPGKSVCKEVLQNGDTCQTLADGYKLDNGALTTCSAGCKTCTSNTVCTECMYGYAKTNNECKVCTTGCATCAGSTSNCDICSTGYYKSGSTCVSCTANTADGTITGVANCANCAPPLNDKGSVLCYLVQSGENTNKSGLSAGAIAGISVAVIIVVGGLVGFLCWWFMCRGKA

SEQ ID NO: 164 - protein, 832 aa, Giardia intestinalis
MRALILLLLHGIFSECTQDSDCGGATGVCNVTIGGKKYCSKCDGARVPVNGDCRLLSLSRSICIVPTGSNPTPGSCSGCIRDFLFYRGGCYRTASLINAICKEKHIVEEGMYCGACAIEGDVPIDGVCVPAGSAAGNTCSKGVCTTCGNGYFLHYGSCYKFDSSPGSIVCPNQSDTTGSVCGSCGSKFLRNPSASSSATSCLACYGLDGTLFCERCRMNVLTSADSKPTLCTQCKIGYVPVDGRCLSNYSALAALAGCSDPRGNGLCDACSSGFMLFYGSCYSVDGPLAQAICAAEDQIYVNGRVLCKRCAQPDHYPLNGVCIGQSSDGTDGHTCSGGSCTACSTKQTADGTPEFFLFYGGCYDITHPIGKSICSAVVGGVCTTCASSDSSSVITITADGQSSKCLACWDDTVGGVANCGGCSLASDDPAKVVCTRCSDSTEPGEDGACPRALPPATPEGCAVQGCQACLKDSATTCDACFEPLIMKEDKTKCFGSCLALGPGYYNASGACARCAENCLSCVDGTSCSRCADGYYLEVSGSDSSTGACRPCAAGCSTCNDGSSTGCTTCLFGYYIATERRGQPGQCVKCDSDGNGYVGVQHCIVCRSTVGDGGAKNVVCQKCKDGYLKETDQGKTVCEAPPPTCTVELCALCVADDPNRCEHCTAGAYLCPRTAACTKDCASCGGSTYPDEDLGECQPCDIANCRVCATGLKCESCAENAVPISPDVYHTACMGCSDTGGMDGWVGLAGCTTCELTDKGGGSVNCLDPGYYRRGGLGGGAIAAIVIVVLLVLAVAGFLVWWFVFRRGGRPKRGAKYTSLMRGESYDYRQSLI

SEQ ID NO: 165 - protein, 167 aa, Giardia intestinalis
MGNGVCTQCEDNYFLKDGGCYQTDRQPGKQVCSSAQGGNGKCQTCANGLAATDGNCAECHPTCATCSTAGAADKCKTCATGYYKENGDDTTDGPCKKCSEKISGCKQCVSSSGSSVICLESEVGTGGSVNKSGLSTGAIAGIAVAVIVVVGGLVGFLCWWFLCRGKA

SEQ ID NO: 166 - protein, 741 aa, Giardia intestinalis
MFGSFIFAGLAIQIAWAEKVAEHVREVQCADNTNCAADACNVLIGDKLYCSQCDAGSVPINGKCVGKDGATDKCKDSSGGNTADQTCGQCAGQTFMYKGGCYEAAQQPGQTMCTQASEGKCTQAAQGYFVPPGADVSHQSVIPCGDATGITLGDKTYTGVAGCTTCDGSALTSQANGVAKCTACGPDAQQTARIVKTDGGATSCVTEQECTGTEGFFVDTTGGKKCSKCAETCKTCKTGAAKCTPCKDDKPYLKKDDESTTGTCVDANGCPATHYVDKEAKECNTCASGGTVDCATCEKGPTGVVCKTCGPNKKIQPNKKGCVESCPLNSNEEKTSGVCECVEGYVPDNAGTGCTKKSDPQCNTPGCKTCSEPKTSKEVCTECEGTKALTPTGQCIDNCGDLGGYYAGTNEGGKKACKKCEVENCLLCNENGQCDTCKDGYYKSGAACAKCDTSCKTCANGNSNGCTSCEPKKALSYEGEGNTGTCKPGCEPNANNCEKCELTVNGTAYCSKCKDAGQFPQNGVCSAAAGKAITCTTQGSGVCNKCANGLLRMNGGCYETTKFPGKSVCLAAAEASDACQTPADGYKLDNGALTTCSAGCKTCTSQDQCDTCKAGYAKTGGNTQKCVPCATGCSECNANDATKCTVCAAGYYLSKEKCIACDKSDGGSITGVANCASCAPPSAGSGSVLCYLIKDGDSTDGSTNKSGLSTGAIAGISVAVIVVVGGLVGFLCWWFICRGKA

SEQ ID NO: 167 - protein, 741 aa, Giardia intestinalis
MFGSFIFAGLAIQIAWAEKVAEHVREVQCADNTNCAADACNVLIGDKLYCSQCDAGSVPINGKCVGKDGATDKCKDSSGGNTADQTCGQCAGQTFMYKGGCYEAAQQPGQTMCTQASEGKCTQAAQGYFVPPGADVSHQSVIPCGDATGITLGDKTYTGVAGCTTCDGSALTSQANGVAKCTACGPDAQQTARIVKTDGGATSCVTEQECTGTEGFFVDTTGGKKCSKCAETCKTCKTGAAKCTSCKDDKPYLKKDDESTTGTCVDANGCPATHYVDKEAKECNTCASGGTVDCATCEKGPTGVVCKTCGPNKKIQPNKKGCVESCPLNSNEEKTSGVCECVEGYVPDNAGTGCTKKSDPQCNTPGCKTCSEPKTSKEVCTECEGTKALTPTGQCIDNCGDLGGYYAGTNEGGKKACKKCEVENCLLCNENGQCDTCKDGYYKSGAACAKCDTSCKTCANGNSNGCTSCEPKKALSYEGEGNTGTCKPGCEPNANNCEKCELTVNGTAYCSKCKDAGQFPQNGVCSAAAGKAITCTTQGSGVCNKCANGLLRMNGGCYETTKFPGKSVCLAAAEASDACQTPADGYKLDNGALTTCSAGCKTCTSQDQCDTCKAGYAKTGGNTQKCVPCATGCSECNANDATKCTVCAAGYYLSKEKCIACDKSDGGSITGVANCASCAPPSAGSGSVLCYLIKDGDSTDGSTNKSGLSTGAIAGISVAVIVVVGGLVGFLCWWFICRGKA

SEQ ID NO: 168 - protein, 229 aa, Giardia intestinalis
MQGGTCGDACTADKNGCKVCGARIGGTDYCSQCSVDNQAPLNGVCTTSNARVAFCTEMNNGACTKCAANYFLKEGGCYETTKQPGKQICTLADSKGECETCANGLQPNNGACPSCHSTCKTCSTADSSDKCTSCAAGYYMVGSAAGPCTSCDSNSGSVKGVTGCMSCAPPSNNQGSVLCYLMNGDSAGGSTNKSGLSTGAIAGIAVAAVIIVGGLVGFLCWWFLCRGKA

SEQ ID NO: 169 - protein, 636 aa, Giardia intestinalis
MFYAFLLIGLTLQLATEECTPVSGGGPETCKTCGATIGGVSYCSQCNDSGSESAPTDGKCTTDNAVCNAKAEGKCTTCTGSSFMYKGGCYSKDTKPGNAACTQAAAGVCTQAAQGYFLPPDADRDNAHQSAIPCGSEEEVPAKNNHKYKGVPHCTQCDTPDVAADANAKAATCTACESGYFVDNSKGKTCTACADNCLTCTDGTVSKCKSCTAETYFLATEGSEGPCISCGDATQGSGAWKGVAGCAKCTKPQSAGPATCTECQADKYLKTESGTASCVSAEECKDGFFPTADAQGKKVCAKCSDTANGGIEDCAKCSLKATSARAGPMVTCSGCETKRLSPLNDACLEECPAGTYPDNRDSTGICASCHNTCASCSTNAETSCTACYPGYVLSRSSGDAGTCIKECTGDFMAHCKADGCSLNVGGSKYCDQCEDGYAPVDGVCTKVASTARDASGCKASGGKCTECGANYALLSGGCYNTNKVPGNSVCTLSVGGKCTMCVASGADPKGQACPTCPDGCLKCTGNVGSQTCSSCLSGYYLSTNKCFRCTAGDGASANAITGVENCISCAPPTGGNGGSVTCYVKNDDSSGSGTGGSTNKSGLSTGAIAGISVAVIVVVGGLVGFLCWWFICRGKA

SEQ ID NO: 170 - protein, 673 aa, Giardia intestinalis
MLLVAFCFALSTLAATCSADTQVGKCKENMCEMAGSTEICTECKDQGNVPIDGICKPQNDNAVTTAGCKKKAGDNVDASSVRCEQCDAANHFLYKGGCYSKDATPGNQMCKTVTTNGICAEAATTKNYFVVPGATKTDQSVVWCGDVEGVTLGDGKKYTGVDGCTTCEKPEQATDAPKAATCNACGGGKIVKTVDGVTSCVEEADCNNGYFVDSRNGKKCSKCASSCKTCENTETQCTSCTEATPYLKKEDDSETGTCVNQGDCPATHYIDEAAKTCTTCTSGGAKDCKTCEKNGDGAVCKECPDSDKTIFGLNKKSCVASCPANSTPKATGQDSQVCECNEGLQPNTESTECRPISNCNTEHCLECTGEGADKEVCTKCLSEYYLTPTSQCVSDCTTLKGYYGDDSGKKTCKKCNDACVECKGEGADKCTACPAGKMLQYTDADTPANGGTCMNQCSVSSTNDGCAECGAQIGGTAYCSKCKNAQQAPLDGNCAANTRTRFCTTVSNGACTQCENNYFLKDGGCYQTNRQPGKQVCTTVQGGKCTKCASGLTADNGDCSNKRCHLSCETCTAANDANACATCSTGYYKPQSAGTKCNPCSEGLAGCRQCTVSSTDAFMCLEMGDGTSDNTGGSTNKSGLSTGAIAGISVAVIVVVGGLVGFLCWWFICRGKA

SEQ ID NO: 171 - protein, 747 aa, Giardia intestinalis
MFCRFVLAGVILQFVWTAQIAEKAGTATCADQTTNCADEACNVLIDGKLYCSQCKADPADRAPVNGVCTDVSSDTAVCKTHAGGKCTGCNGNSFMYKGGCYERAKPPGNAMCQAADAGKCTEAVAGNKYFVPPADTDDAHDSVVSCGDATGVTLTGDKIYTGVAGCATCEKPEQLSASGTKAATCTACQEGKYLKTATDSATSCVTEEECTGTEGFFVKNGGTKTCEACDPGCKTCKTEAAKCTSCKDDKPYLKKDNGSDTGTCVTETECKNQSTHYADDTEPKTCKACAEGTSNGCATCEKGADGAVACKTCENQKKVQPNKKGCVESCPLNSNEEKTSGVCECVEGYVPEEAGTGCMKKSDPPAAPCNTPGCKTCSEPKTSKEVCTECEGTKALTPTGQCIDACGDLGGYYAGTNEGGKKACKKCEVENCLLCNGQGQCETCKDGYYKKETACAKCDTSCKTCANGNSNGCTSCEPKKALSYEGEGNTGTCKPGCEPNANNCEKCELTVDGTAYCSKCKEAGQFPQNGVCSAAAGKAITCTTKGTGVCDKCANGLLRMNGGCYETTKFPGKSVCLAAAEASDACQTPADGYKLNNGALITCSAGCKTCTSQDQCDTCKAGYAKTGGNTKKCVPCATECSECNANDATKCTVCAAGYYPSKEKCIACDKSDGGSITGVANCASCAPPSAGSGSVLCYLMNGESTGGSTNKSGLSTGAIAGISVAAVVIVAGLVGFLCWWFICRGKA

SEQ ID NO: 172 - protein, 99 aa, Giardia intestinalis
MCNAKIAGSNYCSKCITGQAPINGICTSVTRSARDAVGCAPSNGKCTACTGDYFLQFGGCYEKTQFPGKMVCADVDSQRKCNSCLKFVMYILTLLRSWK

SEQ ID NO: 173 - protein, 194 aa, Giardia intestinalis
MGGCYSTQKAPGSFMCKTAGNTGICTEAANNRYFVVPGASNTDQSVLACSNPLGTLTGTGNTAKAYVGVEGCSQCTAPAALSDGGMAPAVCTSCDSSKKPNRDDMCEACSSGKVSPGRKSCVDGCPSNSTDDNSVCVCNDGYSPDDAGASCVSSGANRGGLSTGAIAGISVAVVVVVGGLVGFLCWWFLCRGKA

SEQ ID NO: 174 - protein, 96 aa, Giardia intestinalis
MAPAICTSCDSGKKPNRDGTGCVLCSDTNCKSCVMDGVCGECSDGYSLEGGRCVSSGSNRSGLSTGAIAGISVAVIVVVGGLVGFLCWWFICRGKA

SEQ ID NO: 175 - protein, 825 aa, Giardia intestinalis
MSRSLSVLLLACLPIGFFSEETPLYRNGFGYSCENGMPNCLPNSCIFDLAGGFFCVECGSEHVPINGTCVSTAHEAVSKAGCAKSPMGGWCMKCGDGYFLFYGGCYELTGGWKAGICDRAEGGVCKECGKGSKISIPIVFTNPNTTSPERCIHCGDPVGFGGYSGTIHCQYCKPPKYAWKTEADCFSCSLPQTMCTFDYRCKIVTSGVDTGYCISCPTTHILSANACFSIDSPIGNSICLPKNIIDITDRSLCVQCTNSSEAPLQGNCVAIAEFSDICVKDTKTGRCTACKNKGDTSYYLFYGGCYSANHGSGEQIGTTICQAAENNICTTCNSSINDVFTKNNGCWRCGDSANGGIEGCQRCEMKDSGLQCLECRDLYLSLDKRSCLASCPKGQKGIQGSSSSVHSCACDDGSYLKDGKCVGCTVENCAECDESSCKKCKYGYTLSGSQCVATKCKDPNCDTCENRDVCTKCADDHSLDPHGLCVKDCLGSAGYYKATVGGVSRCVACTLGNCAVCESESKCKACRDGFYVEGSGGCKPCSSECATCSGPASGDCTSCPAKRRLQYSDGAKGSCVPQCVQDSSCAECGLTVGGTSYCSRCVKSTEYPNNGACTSSGSRAVGIACANVAAGRCVACSSNSFSLNGGCYTSTLLPGKTVCTKASDGWCDSTVAGYGITYNGTLLTCPTNCAMCSSGVCSACNSGFYLEKGACKACSKGCATCPHGKACFTCLAGYYFSESTCKACHKAISKCSLCVVPEGAVKPICLEYDNTSKKSALSSGAISGIAIGVVLVVGGVAGVLVWVFVFRKKAGVPPLYKQSIVASTH

SEQ ID NO: 176 - protein, 393 aa, Giardia intestinalis
MLVGFLLVCATVLANCATGQCRAGHVPIDVCPDSSAVYGAGSECTVPNCKRCAQGKPAECEECNSNFNLDSNTKQCNPVSAECTVPNCKACDNPKTDNEVCTECNDGNYLTPTSQCVSDCTAISGYYGDTNERKCKKCNDACAECKGAASNQCSACPAGKKLTYTDDSNPNNGGACGDACKVSADGTGCETCGAQIGGTAYCSKCKTSTQAPLNGNCAANTRTRFCTTVSNGACTQCAANYFLKDGGCYQTDRQPGKQVCSSAQGGTCQTCANGLQAQGGACGECHSTCATCSTADAADKCKTCATGYYKENGDDTTDGLCKKCSEKISGCKQCVSSSGSSVICLESEAGTGGSVNKSGLSTGAIAGISVAVIVVVGGLVGFLCWWFLYRGKA

SEQ ID NO: 177 - protein, 87 aa, Giardia intestinalis
MVGSAAGPCTSCDSNSGSVKGVAGCMSCAPPSNNQGSVLCYLIKDTGSTNRSGLSTGAIVGIFVAVIVVVGGLVGFLCWWFLCRGKA

SEQ ID NO: 178 - protein, 804 aa, Giardia intestinalis
MLGLLPLALLASLCKSSRDVYYNKFGVGCDGKQENCAQDRCILLGSDQLCTQCVPGYVPIDGKCQKYPGASSSPCTPDDPASPTRCIACKQETNIFLFYGSCYTITTAQDRNLGNFLCSEASNGVCTECFESKFERYVFTNPDVGAVEKCILCSDTVGFNGYKGASGCSDCLPPITDKIGIALCVRCHYTTEDRHFYPIDYQCQAKGPHNCVNGYCTSCYKTHLLYKLGCYSRHSSTGLAICVEANQYELDNVTICKECANASYAPRNGACILIKENPSIEEIAFKCTKDPTKGLYTACPASAKSFLFYGGCYDEDAHISSRLCSRIGSNACEQWNSAFKWIFSKNGDNNKNGYLCGDITNGGISGCATCNYASGAVTCTRCSAGYLGVDGKSCSESCSGDTQGACTEIVEKSSSTKILSCRCICRMGLYNSSGTCTPCTDSCAVCKDGTLTGCQQCSPGKILSFSIASSESADCVSQCSVGSECAECGITIDGSRYCTRCKDASTYPFNGVCILNTQRDAYCTSKANGVCTTCSSSAFLMNGGCYTKAHYPGSTICDKQSNGKCTTTKKGYGISPDGKLLECDPTCLACTAPGPGRCTRCPSDKLLKRASGATTGSCVDPGACVDGYYADGDACLPCATPGCKACGHASFCTECAGELFVSLDGQSCLEECTGDKVVGEVPGGVRRCWCERGFLPALDRSECVLPIECPPDMPSCAACNESGNCLSCVTSGHNVQVDQRTCAEGCGARASSNQGVCMCEFDAVLTKDICVSAKELAKKRTAAIAGGTVAGVIVIGSLVGFLCW

SEQ ID NO: 179 - protein, 553 aa, Giardia intestinalis
MKQDPVRLLMQTRAVLCQLLASMLVGIGLIFAVALTEVCSPSIDGCAECDSTGQGCTKCDANGNTPYLKKTNPSDPTGTCVSAVDCQGSAGYYTDDSVSDAKECKKCAEGQKPNTAGTQCFSCSDANCERCDQNDVCARCSTGAPPENGKCPAATPGCHSSCDGCTENAMTNQADKCTGCKEGRYLKPESAAGQSGTCLTAEECTSDTTHFTKEKAGDSKGMCLPCSDATHGIAGCKKCALKTLSGEAESTVVCSECTDKWLTPSGNACLDNCPAGTYPNDNNLCTSCHDTCEECNGNADAASCTACYPGYSLLYGSGTAGTCVKECTGAFGANCADGQCTADVGGAKYCAQCKDGYAPIDGICTAVAAAGRTNVCTAADGKCTKCAGEYTLMSGGCYGVAKLPGKSVCTLASNGKCIMCAANGQAPVQEKCPECSEGCAKCNDSNACTECLPGYYKGAGDKCFKCTASSGNNNQITGVANCVSCAPPAGGSGSVTCYVKTDGTSGGDDNTGGSVNKSGLSTGAIAGIAVAVVVVVGGLVGFLCWWFICRGKA

SEQ ID NO: 180 - protein, 197 aa, Giardia intestinalis
MVSESGILQECSIANCAECTADACVRCKLGYVSVDGQCQKCAQGCVTCIAPDNPQMCTLCDTGYYQSTTGSAFTCTACGADNNGMKGVNGCTCCMPPEGKVGSVLCYSFDALPSIIPTPKPGPDPVPDPVPAPAPSSARKTAMIAGVSVTAILLVTGLVSFLLRWLLCRRTQSHETKRVTLTRKRVPIITSITAPLT

SEQ ID NO: 181 - protein, 832 aa, Giardia intestinalis
MRVLILLLLHGIFSECTQDSDCGGATGVCNVTIGGKKYCSKCDGARVPVNGDCRLLSLSRGICIVPTGSNPTPGSCSGCIRDFLFYRGGCYRTASLINAICKEKHVVEEGMYCGACAIEGDVPIDGVCVPAGSAAGNTCDKGVCTTCTGGYFLHYGSCYKFDSSPGSIVCPNQADTTGSVCGSCGSKFVKNPSASSSATSCLACYGLDGTLFCERCRMNVLTGADVKPTLCTQCKIGYVPVDGRCLSNYSALAALAGCSDPRGNGLCDACSSGFMLFYGSCYSVDGPLAQAICAAEDQIYVNGRVLCKRCAQPDHYPLNGVCIGQSSDGTDGHTCSGGSCTVCSTKQTADNTPEFFLFYSGCYDITHPIGKSICSAVADGACTACASSDSSSVITITADGQSSKCLACWDDTVGGVANCGGCSLASDGPAKVVCTRCSDSTEPGEDGACPRALPPATPEGCAVQGCQACSKDSATTCDACFEPLIMKEDKTKCFGSCLALGPGYYNASGACARCVENCLSCVDGTSCSRCADGYYLEVSGSDSSTGACRPCAAGCSTCNDGSSAGCTTCLLGYYIAAEGKRQPGQCVKCDSSIGGYMGVQHCIVCRSTVGDGGAKNVVCQKCEDGYLKETDQGKTVCEAPPPTCTVELCALCVADDPNRCEHCTAGAYLCPRTATCTKDCASCGGSMYPDEDLGECQPCDIANCRVCATGLKCESCAESAVPISPDVYHTACMGCSDTGGMDGWVGLAGCTTCELTDKGGGSVNCLDPGYYRRGGLGGGAIAAIVIVVLLVLAVAGFLVWWFVFRRGGRPKRGAKYTSLTRGESYDYRQSLI

SEQ ID NO: 182 - protein, 540 aa, Giardia intestinalis
MFYAFLLTGLALELVRAAQAGDECEEVASSEPNTCKACSAVVNGKKYCSQCNGGGSQSAPTDGVCSADNNECTRKQDGKCTQCANKSFMYKGGCYKDSQAPGNTMCETANAGVCTQAKEGYFLPPGTDNAHDSVVSCGDTTGVTLTGDKKYTGVAECVTCTQPGQLSIGGTKAAICTKCAADLYLKIDRGVMECVAESGCGEGFFPTIVDGVKKCAGCSEAGSGGIEDCELCIPRAPAPEAGVKVTCSKCHASKKVSPLKDECMDNCPAGTYDKQNVCTPCHSSCASCQTDDKETSCTACYPGHSLLYEANGATGRCVKECTGAFITNCADGQCTADVGGAKYCAQCKEGYAPIDGVCTAVKIGRDASVCTAASGKCTACTGAYALISGGCYGVAKLPGKAVCTAANNGECTTCANGQQPSGKVCPTCPAGCSKCTGSAPSQQCSECFPGYYKSGTKCVACDKDDGSIKGVPNCLSCKEPASSSGAVTCYVKTDGTNNGGSMNKSGLSTGAIAGISVAVIAVVGGLVGFLCWWFICRGKA

SEQ ID NO: 183 - protein, 529 aa, Giardia intestinalis
MGVEGCATCTAPTNNKGAATCTECQDGYYNDGGACTKCHTDCETCSGAGPNACTSCKAGKFLKTDTNTCVEAGQCGAGKYADKQSGECKACSEITGCTACAYNDQLQKPVCSTCGGAKPLLKGYVDGSTECVDKAGCAALNTVGTHFLSQDENSCILCSATGGTAPDEGIAECSGCKKTDLAQPPICSACLPGFYFDTTCKPCGTNCATCNSANANQCQTCKPGYFLKGGQAPGECVSCDSVDNKGREGCSACSNSGTFKCTDCKPNYRKQPNGDAGNDYTCVKTCEDDTACGGTSGACDAMIIDSTGKELHYCSYCGDNDKYPIDGLCATDKQGNTCDNHVCESCTTGYFMYMGGCYSISAQPGKSMCTKAGEGVCTEAAAGYFIPPSPTKDKQSVLSCGNPLGVELAGQKAYVGVDGCSQCTAPTALTEAGMTAAICTSCDSDKKPNKDGTGCVTCSVGDCKSCVVDDVCGECNSGFSLDNGKCVSSGTNRSGLSTGAVAGISVAVVVVVGGLVGFLCWWFVCRGKA

SEQ ID NO: 184 - protein, 195 aa, Giardia intestinalis
MCVSTTARAAAECVAGEGVCTSCTGAYFLESGGCYKTGAFPGNTLCIAAGANGKCANCANGQNADPQTGACPPCPANCSKCSGDSGVKTCTECYSGYYLDTGKECKKCSETSGNIQGVPNCVSCKAPSSPNAPTPVTCYVKTDGTNNGDNDNNGGSTNKSGLSTGAIAGISVAVVVVVAGLVGFLCWWFICRGKA

SEQ ID NO: 185 - protein, 542 aa, Giardia intestinalis
MQTRAVLCQLLASMLVGIGLIFAVALADACSPSIDGCAECDSTGKKCTKCDPNDPSNKKYLKDGACVTDAECTGAHDHYADSTDPTALVCKACGKNEKPNTAGNACFVCPDPNCRRCNEANKCADCATGKPQADGTCPAATPGCHSSCKECVSGANTSEDDKCLSCSGDNYLKVTNAAARSGVCVSASACTSDKTHFAKEVTDSNGSKKMCLSCSDATHGIADCKKCSSTASSAQTELALVCSDCGIKWLSPLGNACLEKCPAGTYSDRSADGISVCASCHSTCAECNGNAEATSCTACYPGSVLSKGNGGATGTCIPECTGRYAENCEAGQCTAVVGGSKYCSKCKAGFAPVDGVCVPITQRTIAGCNPGQDGTCTSCKDAYFKESGGCYQSTTYPGDKLCTTASQGKCTTCANGQAADNQGSCPACPDGCSKCTAGSSPQQCSECFPGYYLDAGKGCKKCSETSGNIQGIPNCVSCAPPTGGNGGPVTCYIKTDGANNGGSTNKSGLSTGAIAGISVAAIVVVGGLVGFLCWWFICRGKA

SEQ ID NO: 186 - protein, 733 aa, Giardia intestinalis
MLFRPTTRHRLAALMFGRFLLAGAILQLARAACEEDKTSTDGKCKTCGVTIGQDTWCSVCIGENYAPINGTCADITTDSVGSVFCTQKAGGVCTQCAGNSFMFAGGCYSSSEGLPGYNLCLRSAGNGVCAEAAPGYFIPGETAATKPSVISCSDKTGLLITAHTYKGVEFCEECSGSELTSGQDGTAKCTKCGASKYLKDNACVDNAEACGKGYFGKPDAAAGNKCIACTDQSDGGTAGCAECMYDSNTRKAICTKCTTDYLRKKADGTTECVAANECDDTQKGFYKVVDSTNGNKCVSCADGAGLAVGTDGAWKGVDGCAKCIKPADINTPTKCDECKPGYEISTDKTKCTSTAPPDCPIENCKVCSEDKRACEECNSNNYLTPTRMCIDDCKKIGNYYYTSNANNKLICKECAVANCKECENTGTCKTCDDGFYKSSEECKACDSNCKTCNGGTSADCTKCLSGAVLKYGNDGTKGTCGAGCATGTGAGACKTCGLIIDGTSYCSECAVETEYPQGGVCSSTTVRAAATCKAGSVAKGMCNSCTNGFLRMNGGCYETTKFPGKSVCEEAASAGDTCQKEAPGYHLNNNDLVTCSPGCKTCTSNTVCTACMEGYVKTSDSCAKCAAGCATCTGSTTACDTCSTGYYKSGTTCVSCTESNSDKTITGVANCASCAPPLNNKGSVLCYLIKDSGSTNKSGLSAGAIAGISVAVIIVVGGLVGFLCWWFMCRGKA

SEQ ID NO: 187 - protein, 443 aa, Giardia intestinalis
MGGCYDKCPYGNGADTNTCADAPAGPASCNPQSPDATSCAPDSCNVVIEGQTFCSKCTGGKVPVNGECKAKGDAPLCTAGANAQEGTCAACTGAQRLYMGGCYDKCPYGNGADANTCADAPAGCNTPNCKACDNPKTDNEVCTECNDGNYLTPTSQCVSDCTTLKGYYGDDSGKKTCKKCNDACAECKGADANQCTACPAGKMLQYTDENSPSSGTCVDGCKPQSGASGCEICGATIGGTKYCSKCSTSTEVPVNGVCKADNARAPVCSKKDNQGGCATCASGYFRQDNGCYKTDRQPGIQICTLASSAGKCETCANSLQPNDGACPSCHSTCKTCSAADSSDKCTSCAAGYYMVGSAAGPCTSCDSNSGSVKGVAGCLNCAPPSSSTGSVLCYLMNGDSAGGSTNKSGLSTGAIAGISVAVIVVVGGLVGFLCWWFLCRGKA

SEQ ID NO: 188 - protein, 394 aa, Giardia intestinalis
MLVGFLLVCATVLAKDSGKDTCFPGYTLNTDTKQCTKDPEAPCNVEGCETCVEGNAQQCKTCRPGYTINTDTKQCTKDPEAPCNTPNCKTCDNPKTDSEICTECNDGNYLTPTNQCVPDCTTISGYYGDTDKKCKACNPECAECVGPANNQCSSCPAGKKLTYTDDSNPNNGGTCGDACKVSADGTGCETCGAQIGGTAYCSKCKTSTQAPLNGDCAASSRATFCTKMGNGVCTQCEDNYFLKDGGCYQTDRQPGKQVCSSAQGGNGKCQACANGLAATDGNCAECHPTCATCSTAGAADKCKTCATGYYKENGDDTTDGPCKKCSEKISGCKQCVSSSGSSVICLESEVGTGGSVNKSGLSTGAIAGIAVAVIVVVGGLVGFLCWWFLCRGKA

SEQ ID NO: 189 - protein, 720 aa, Giardia intestinalis
MFQLIPLFVASALMAACQQDGNHLTTCAHEKCETVGSTEICTQCKAGGVPVDGFCRPFGSPQAAAAGCTKADGAALDKTATTCEKCGDGYFLFMGGCYKTTDGPGSEICTAASNGVCTTCKADNGLFKNPVTPQKPGSECILCSDTIDRNGVMGVAGCSECSHTGTSGPATCTECQAGFVTKDSACVKCGDGCSACSADTPTQCTACVEGKFLKDGNTCVEATECGADKYADKKTWTCKACDPDIAGCTACEYNDATGKPRCTNCGTNKTPRTTLDGTSTCVTKDYAGCKGADGALFMKEDKTCVLCSTVSAGADPNDQGIAGCKKCTKDSATPPTCSECLDGYYNSATGGSGTATCEACGDNCATCAKDTKDQCMTCKPGFFMKGSGPGTCVPCDDQTDGVPGCATCTFSSSLTCNSCKPNYKQSGTGPFTCTKTCEDPTACGGTSGACDAMIIDDQGTTKHYCSYCGETNKIPIDGKCVDSGSINGNTCAKGVCTQCAQGYFLYMGGCYKVASPPGNLMCTEATTAGVCDTPNANNKYFVVPEAKPTQQSVLACGNPLGTLVGTDSTAKAYVGVDGCSQCTAPTAPSEGGMTAATCTACTNNNKPNLAGSGCFPCTVSGCSHCNRDDMCEACSSGKKVSPGRKSCVDSCPSNSTDDNSVCVCNDGYSPDSSGTSCVSSGANRSGLSTGAIAGIAVAVVVVVGGLVGFLCWWFICRGKA

SEQ ID NO: 190 - protein, 96 aa, Giardia intestinalis
MTPAVCTSCDNSKKPNKDGSGCVLCSDTNCKSCVMDGVCGECNSGFSLDNGKCVSSGANRSGLSTGAIAGISVAVIAVVGGLVGFLCWWFVCRGKA

SEQ ID NO: 191 - protein, 598 aa, Giardia intestinalis
MLYSDSDSDSAMWCGGDSGGVGLFFMGGCYKTESQPGSDICTAASNGVCTTCKADNGLFKNPVTPQKPGSECILCSDTTDRNGVMGVAGCSECSHTGTSGPATCTECQAGFVTKDSACVKCGDGCSACSADTPTQCTACVEGKYLKGGNTCVDAGGCDNGNYADKKTWTCKACSEIQGCTACAYDDATGKPKCTDCGSKTVRDELDGTTTCVDEAECKVGKTHFYDASKCVQCGDNGKGGVQNCKLCTAKGTCEACVDGYKVNGNACEACTGNCAECGTAGQINTCTRCMPGYFLKDGPPKTCVLCDDETSGIPGCAECTGGVGSLKCTECKPNYRPSGEPSDLTCTKTCEDETACGGTSGACDATVIDANGKELHYCSYCGESGKYPIDGKCVDNAQSNTCNNHVCTSCAQGYFLYMGGCYKVDTVPGNYMCKASSKEGICTEAANNRYFVVPGAQTTDQSVLACGNPLGTLVGTQGTAKAYVGVEGCSQCTAPAGLSEGGMTPAVCTSCDNSKKPNKDGSGCVLCSDTNCKSCVMDGVCGECNSGFSLDNGKCVSSGANRSGLSTGAIAGISVAVVVVVGGLVGFLCWWFVCRGKA

SEQ ID NO: 192 - protein, 168 aa, Giardia intestinalis
MCTEATTAGVCTTPNANNRYFLVPGASNTDQSVLACGNPLGTLVGTGNTAKAYVGVDGCSQCTAPTALTTVGMTPAVCTSCDNSKKPNRDGSGCVVCSDTNCKSCVMDGVCGECVDGYNLEGDKCVSSGANRSGLSTGAIAGISVAVIVVIGGLVGFLCWWFVCRGKA

SEQ ID NO: 193 - protein, 183 aa, Giardia intestinalis
MYMGGCYDVSKAPGSHMCKKADNNGICTEAASNRYFVVPGAQTTDQSVLACGNPLGTLVDPQGTAKAYVGIDGCSQCTAPTALTTAGMTPAVCTSCDSDRKPNRDGSGCVLCSVGGCKSCVVDDVCGECVDGYNLEGDKCVSSGANRSGLSTGAIAGISVAVIVVIGGLVGFLCWWFVCRGKA

SEQ ID NO: 194 - protein, 446 aa, Giardia intestinalis
MACSTITDCTACKYNATVSKPQCTNCGSKKVKTAIDGTTTCVDVSSGCQDADHFKADGDAACVLCSDTSGDNENTNKGLEGCSACTKPNNNQPPACTGCLPGYYDSAPGTFKCKACAPNCATCTQIGDDKCLTCKEGFFMKVSGPGECVPCSDTAKDGIDGCATCTFSSSLTCNSCKVNYKQSGTPSTGVTCTRTCEDDTACGGTSGACDAMIIDDKGTTKHYCSYCGETNKIPIDGKCVDSGQKNGNTCDNHICTSCTTGYFLYMGGCYSVSTQPGKSMCKTAANGVCTAVNENNKYFVVPEATNAQQSVLACGNSLGTLVDPQGTAKAYVGVDGCSQCTAPTALTTAGMTVAVCTACDSGKKPNKGGSGCVTCSVGDCKSCVVDNICGECVDGYSLDNGKCVSMSTNRSGLSTGAIAGISVAVIAVVGGLVGFLCWWFVCRGKA

SEQ ID NO: 195 - protein, 183 aa, Giardia intestinalis
MNGCYKVGQEPGSHMCKTAGNTGICTEAANNRYFVVPEATNAQQSVLACGNPLGTLIGTQDNAKAYVGVEGCSQCTAPVALTEAGMAAATCTSCDSDKKPNKDGTGCVLCSVGDCKSCVVDDVCGECVDGYSLDSSGTSCVSMSTNRSGLSTGAIAGISVAVVVVVGGLVGFLCWWFICRGKA

SEQ ID NO: 196 - protein, 183 aa, Giardia intestinalis
MGGCYKIGAEPGNLMCKTAEGGKCTAVNANNRYFVVPEAQATDQSVLACGNPLGTLVGTDSTSKAYVGVDGCSQCTAPVALTEAGMAAATCTSCDSDKVPNKDGTGCVLCSVGDCKSCVVDDVCGECVDGYSLDSSGTSCVSMSTNRSGLSTGAIAGISVAVVVVVGGLVGFLCWWFICRGKA

SEQ ID NO: 197 - protein, 128 aa, Giardia intestinalis
MTPAICTSCDSSKKPNRDGSGCFPCTVSGCSHCDMDNMCEACSSGKKVSPGRKSCVDSCPSNSTDDNSVCVCNDGYSPDSSGTSCVSSGANRSGLSTGAIAGISVAVVVVVGGLVGFLCWWFVCRGKA

SEQ ID NO: 198 - protein, 215 aa, Giardia intestinalis
MGGCYSTQKAPGNYMCKTAGNNGICTEAANNRYFVVPEATNAQQSVLACGNPLGTLTGTGDTAKAYVGVDGCSQCTAPAAPSDGGMTPAVCTSCDNSKKPNLAGSGCFPCAVVGCSHCDMDNKCSACTEGGKRPNKEGTACFECNVEGCAYCSGANKCEECSDGFKLEGDKCVSSGTNRSGLSTGAIAGISVAVVVVVGGLVGFLCWWFLCRGKA

SEQ ID NO: 199 - protein, 98 aa, Giardia intestinalis
MTPAICTSCDSDKKPNKDGTGCVLCSVGDCKSCVVDDVCGECVDGYSLDSSGTSCVSMSTNRSGLSTGAIAGISVAVVVVVGGLVGFLCWWFICRGKA

SEQ ID NO: 200 - protein, 707 aa, Giardia intestinalis
MDTALTAVGPPVRPLAPTGAASAQGPSRGSPSPWSSLWGASWASSAGGSYVEGRRDLGSECCTVIVIVIVLCGVWGDSGGVGLLFMGGCYNKDAHPGSEICTAASNGVCTACNTKNGLFKNPVTPQKPGSECILCWDTVGDGATKGVENCAQCQAPQSAGAATCTACQDGYYKNAQTCEKCDQSCLTCETTETQCTSCKGNTFLKDNACVNSDGCTGNTYADPVTMTCKASAITDCTTCEYNPATGGPKCTACNGAKIVKEEADGTTTCIDAGTCTQSGATGENFLSDGDAECILCSNDSSKTDNNKGSPGCGTCSKNGAKPECKTCLDGYYDSGNGNPAVCVACAGDCGKCGPGGAIDTCEKCKPGFFLKNDGAKKCVPCDDPTDGVPGCATCTFSNSFTCDSCKVNYQKKVGAGGAVTCEKTCEDPTACGGTSGACDAIVIDNTGKELHYCSYCGKDSEFPINGLCVGNEKKEGNNCNSHTCTSCTTGYFLYMGGCYKYDTEPGSLMCKTAEGGKCTVANDGNKYFVVPEAQTTDRSVLACGNPLGTLVGTDSTSKAYVGVLNCSQCTAPAAPSEGGMTAATCTACTNNNKPNLAGSGCFPCTVSGCSHCNRDDMCEACSSGKKVSPGRKSCVDSCPSNSTDTDSVCVCNDGYSPDSSGTSCASSGTNRSGLSTGAIAGISVAVVVVVGGLVGFLCWWFICRGKA

SEQ ID NO: 201 - protein, 91 aa, Giardia intestinalis
MCEACSSGKKVSPGRKSCVDSCPSNSTDTDSVCVCNDGYSPDSSGTSCASSGTNRSGLSTGAIAGIAVAVVVVVGGLVGFLCWWFICRGKA

SEQ ID NO: 202 - protein, 614 aa, Giardia intestinalis
MPRRGGLVNRAVMACVTDAGTMFYAVLLIGLMLEMARAAQAGDECEEVTGSEPNTCKACSAVINGKKYCSQCNSGGSQSAPTDGKCTTDNNECSQKQDGKCTQCANKSFMYKGGCYKDSQAPGNTMCETATDGVCTQAKAGYFLPPDADRDNAHQSVIPCGDDTVVTLGNSKQYKGVPHCTQCEKPTEASDTTTAKAATCTACEDGFFGATCEACQDENCATCAMTGNNKCSKCKGTGTKTYLKVDSGSTGTCVEASGCTAATFPKVDEQQGNKCAACNSVPDGGIANCATCSLLTQGSRAAPLVTCLTCEQNKYLTPEKNACLDTCPAGMYAVSGDSGNVCTPCHESCASCSNDAATSCTACYPGHVLSRSSGDAGTCIKECTGDFMAHCKADGCSLNVGGSKYCDQCEEGYAPVDGVCTSIPATARDASGCKASGGKCTECGANYALLSGGCYNTQKLPGSSVCTAAQNKGQCQTCANGQSPAGGKCPACTEGCVKCAGSKETCTDCLAGYYKGAGDKCFKCTDSDKASSNAITGVENCISCAPPAGGNGPVTCYVTQQKADDGTGGDTGGDSTNKSGLSTGAIAGISVAVVAVVGGLVGFLCWWFLCRGKA

SEQ ID NO: 203 - protein, 128 aa, Giardia intestinalis
MTAATCTACTNNNKPNLAGSGCFPCTVSGCSHCNRDDMCEACSSGKKVSPGRKSCVDSCPSNSTDTDSVCVCNDGYSPDSSGTSCASSGTNRSGLSTGAIAGISVAVVVVVGGLVGFLCWWFVCRGKA

SEQ ID NO: 204 - protein, 91 aa, Giardia intestinalis
MCEACSSGKKVSPGRKSCVDSCPSNSTDDNSVCVCNDGYSPDSSGTSCVSSGANRSGLSTGAIAGIAVAVVVVVGGLVGFLCWWFICRGKA

SEQ ID NO: 205 - protein, 229 aa, Giardia intestinalis
MQGGTCGDACTADKNGCKVCGARIGGTDYCSQCSVDNQAPLNGVCTTSNARVAFCTEMNNGACTKCAANYFLKEGGCYETTKQPGKQICTLADSKGECETCANGLQPNNGACPSCHSTCKTCSTADSSDKCTSCAAGYYMVGSAAGPCTSCDSNSGSVKGVAGCMSCAPPSNNQGSVLCYLMNGDSAGGSTNKSGLSTGAIAGIAVAAVIIVGGLVGFLCWWFLCRGKA

SEQ ID NO: 206 - protein, 645 aa, Giardia intestinalis
MLYSDSDSAMWCGGDSDSMRLLFMGGCYNKDAHPGSEICTKAEGGLCTACNTANGLFKNPVTPSEKGSECILCSDTIDRNGVMGVAGCSECSHTGTSGPATCTVCQDGYIKKGDACEKCDQSCLTCDGSGPNHCTSCPEGKYLKTDKSCVNNNGCTGNTYADPESGKCLPCNTIDQACTQCEVDSTTKKPKCTNCGGQKMVKTAIDGTTTCVDANGCATSNVDGSHFLNDGSTKCILCSDDSESLEANKGTPGCKTCKKNGAKPTCSECLDGYYNSGNGGTVTCEACGANCATCTQAGNDKCTKCKPGFFMKQPGSTGECVACDSTTDGGREGCSLCSNNNGFKCTECKPNYRKQSNGDAGDDYTCVKTCEDDTACGGTSGACDAIVIDDKGVEHHYCSYCGEANTYPIDGKCNSAKANNQCDQGVCTQCTNNYFLYMGGCYSTQSPPGNYMCKTAGNNGICTEAANNKYFVVPGATNQNQSVLACGNPLGTLVDTKAYVGVDGCSACTAPAAPSDGGMTAAVCTSCDSSKKPNRDGSGCFACAIEGCSHCNRDDMCEACSSGKVSPGRKSCVDGCPSNSTDDNSVCVCNDGYSPDDAGASCVSSGSNRSGLRTGAIAGIAVAVVAVVGGLVGFLCWWFLCRGKA

SEQ ID NO: 207 - protein, 169 aa, Giardia intestinalis
MCKTAGNTGICTEAANNRYFVVPEATNAQQSVLACGNPLGTLIGTQDNAKAYVGVLNCSACTAPTALSDGGMTAATCTSCDSDKKPNKDGTGCVLCSVGDCKSCVVDDVCGECNSGFSLDSSGTSCVSMSTNRSGLSTGAIAGISVAVVAVVGGLVGFLCWWFVCRGKA

SEQ ID NO: 208 - protein, 280 aa, Giardia intestinalis
MEASTFKCTDCKVNYRKQSGTSPVTCTKVCEDDTACGGTSGACDAMIIDDQGTTKHYCSYCGDSSKYPIDGLCASEAQSNTCNNHVCESCTTGYFLYMGGCYSTQSPPGQHMCKTAANGVCTAVNENNKYFLVPGASNAQQSVLACSNPLGTLVDPQGTAKAYVGVHGCSQCTAPAALTTVGMAAAVCTACDSGKVPNKDGSGCVTCSVGDCKSCVVDDVCEECNSGFSLDSSGASCVSSGANRSGLSTGAIAGISVAVVAVVGGLVGFLCWWFVCRGKA

SEQ ID NO: 209 - protein, 188 aa, Giardia intestinalis
MNGGCYETTKFPGKSVCEGANADADTCKAPVPGYKVEAGKLVMCSKGCDTCSDATTCTKCGDGYTKIENSQTCTKCDSSCETCTGAATTCKVCATGYYKTALGESTCTSCENDSNGVIGVKGCLNCAPPSSSTGSVLCYLMKGENTGGSVNKSGLSTGAIAGISVAAVVVVAGLVGFLCWWFICRGKA

SEQ ID NO: 210 - protein, 96 aa, Giardia intestinalis
MTAAICTSCDSDKKPNKDGTGCVTCSVGDCKSCVVDDVCGECNSGFSLDNGKCVSSGANRGGLSTGAIAGISVAVVVVVGGLVGFLCWWFVCRGKA

SEQ ID NO: 211 - protein, 90 aa, Giardia intestinalis
MVGSAAGPCTSCDSNSGSVKGVAGCMSCAPPSSSTGSVLCYLMNGDSAGGSTNKSGLSTGAIAGISVAVIVVVGGLVGFLCWWFLCRGKA

SEQ ID NO: 212 - protein, 55 aa, Giardia intestinalis
MCFVMGDGTGDNTGGSVNKSGLSTGAIAGISVAVIAVVGGLVGFLCWWFVCRGKA

SEQ ID NO: 213 - protein, 181 aa, Giardia intestinalis
MGGCYDASKAPGSHICKTAEGGKCTAVNDGNRYFVVPGAQTTDQSVLACGNPLGTLVDPQGTAKAYVGIDGCSQCTAPAGLSEGGMTPAVCTSCDNSKKPNKDGSGCVLCSDTNCKSCVMDGVCGECNSGFSLDNGKCVSSGANRSGLSTGAIAGISVAVVVVVGGLVGFLCWWFVCRGKA

SEQ ID NO: 214 - protein, 130 aa, Giardia intestinalis
MAPATCTACSGNNKPNLAGSGCFACTVSGCSHCGAGDKCEGCTSKDQRPSLDGSQCIACSIDGCVRCSEENKCGQCSDGYRLEGGRCVSSGANRSGLSAGAIAGISVAVVAVVGGLVGFLCWWFVCRGKA

SEQ ID NO: 215 - protein, 236 aa, Giardia intestinalis
MLQYTDADTPANGGTCMNQCSVSSTNDGCAECGAQIGGTAYCSKCKNTQQAPLDGNCAANTRTRFCTTVSNGACTQCENNYFLKDGGCYQTDRQPGKQVCTTVQGGKCTKCASGLTADNGDCSNKRCHLSCETCTAANDANACATCSTGYYKPQSAGTKCNPCSEGLAGCRQCTVSSTGAFMCFVMGDGTGDNTGGSVNKSGLSTGAIAGISVAVVVVVGGLVGFLCWWFICRGKA

SEQ ID NO: 216 - protein, 96 aa, Giardia intestinalis
MAAAVCTSCDSDRKPNRDGSGCVLCSVGGCKSCVVDGVCGECNSGFSLDNGKCVSSGANRSGLSAGAIAGISVAVVAVVGGLVGFLCWWFVCRGKA

SEQ ID NO: 217 - protein, 127 aa, Giardia intestinalis
MCEVCAEDNKKPNMAGSTCYVCPAQGCSHCSADNKCEACTNKDQRPSLDGTQCIVCDIERCMRCSAEGVCGECEEGYVPRDGMCVSSGTNRSGLSTGAVAGISVAVVVVVGGLVGFLCWWFVCRGKA

SEQ ID NO: 218 - protein, 228 aa, Giardia intestinalis
MFAGLIFASLVLQLAAATRPAERSRSDTPCTESGNDTCQTCSGSGSNEICLTCKNNDHFLTTNKKGCKAACDATGEIETPGANPKACKCDDASGYQLQGDGTCAKGQDTPCTESGNDTCQTCSGSGSNEICLTCKNNDHFLTTNKKGCKAACDATGEIETPGANPKACKCDDASGYQLQGDGTCAVSNTNKSSGLSTGAIAGIAVAAVIVVGGLVGFLCWWFLCRGKA

SEQ ID NO: 219 - protein, 258 aa, Giardia intestinalis
MLSYCSKCVGAGYGPINGKCTNALAGNTCADGVCTRCTNNYFLYMGGCYKATEVPGSLMCSEATTAGVCTTPNANDRYFVVPEAKATDQSVLACGNPLGTLVDPQGTAKAYVGVDGCSQCTAPTALTEGGMAAAVCTSCDSDRKPNRDGSGCFSCAISGCSHCNRDDMCEVCSSGKKVSPGRKSCVDGCPSNSTDDNSVCVCNSGYSPDSSGTSCVSTSTNRSGLSTGAIAGISVAVVAVVGGLVGFLCWWFVCRGKA

SEQ ID NO: 220 - protein, 98 aa, Giardia intestinalis
MAAAVCTACDSGKVPNKDGSGCVTCSVGDCKSCVVDDVCEECNSGFSLDSSGASCVSSGANRSGLSTGAIAGISVAVVAVVGGLVGFLCWWFVCRGKA

SEQ ID NO: 221 - protein, 127 aa, Giardia intestinalis
MCEVCAEDNKKPNMAGSTCYVCPAQGCSHCSADNKCEACTNKDQRPSLDGTQCIVCDIERCMRCSAEGVCGECEEGYVPRDGMCVSSGTNRSGLSTGAVAGISVAVIAVVGGLVGFLCWWFVCRGKA

SEQ ID NO: 222 - protein, 183 aa, Giardia intestinalis
MGGCYSTQSPPGQHMCKTAANGVCTAVNENNKYFLVPGASNAQQSVLACSNPLGTLVDPQGTAKAYVGVHGCSQCTAPAALTTVGMAAAVCTACDSGKVPNKDGSGCVTCSVGDCKSCVVDDVCEECNSGFSLDSSGASCVSSGANRSGLSTGAIAGISVAVVAVVGGLVGFLCWWFVCRGKA

SEQ ID NO: 223 - protein, 156 aa, Entamoeba dispar
MLFTLLIPLIVAQNPECSSAYCSSCKTNPNVCDSCAPNYILIDGTCKYFKEVVPYCAISSENGCSSCMLGYYLKDGKCQIPPNPLCATYKGDKCIVCVDGYYAKAGECFECVENCYECSSMTQCFECLDGYGFNGDDCVQSLDHCKTYSYGSSTKM

SEQ ID NO: 224 - protein, 461 aa, Entamoeba dispar
MLFTLLIPLIVAQNPECSSAYCSSCKTNPNVCDSCAPNYILIDGTCKYFKEVVPYCAISSENGCSSCMLGYYLKDGKCQIPPNPLCATYKGDKCVVCVDGYYAKAGECFECVENCYECSSMTQCFECLDGYGFNGDDCVQSLDHCKTYSYGSSTRCSECYDGYGLNKKNQCEKCAIDGCYSCSLDYTKCDICYNTKHFDGKACVDFIPVEHCTSYTDSLDCSSCEDGYYLDEGKCKACKVELCNKCNSPYTCNKCQEGYYWNEKECTSCPVIPIGCIGCSGINKCSVCKEGYHLVGSYCYENVEHCVVYSYEQCKTCEEGYYLSKGKCLKGVEHCRSHSSDGKKCIECGKGYYLTEDFKCSKCDSTCNECEHKATYCELDSLNENKEDVHPIRMAHCNRASADGQRCMRCDDNTYLKDGKCVECGDDKCYGCTEDNKCSVCAKTQEDFFNGIVYLPNNNHC

SEQ ID NO: 225 - protein, 157 aa, Entamoeba histolytica
MIFTLLIPLIVAQNPECSSAYCSSCKTNPNVCDLCAQNYILVDGKCKYFKEVVPYCAISAKDGCSACMSGYYLKDGKCQIPPNSLCASYKGGKCIVCVDGYYAKAGECFECVDHCYECSSMTQCFECLDGYGFNGDECVQSLDHCKAYSYGSSTRCR

SEQ ID NO: 226 - protein, 1336 aa, Entamoeba histolytica
  misc_feature (380)..(413): Xaa can be any naturally occurring amino acid
MKSTLWLIVLFSLHVYSQCYDECPYCLWGLCHACTKGCSYGSWRDNAFCSYCYRLLTVIECKRGCEACDEEYHCTKCNLGYWLRKYSSKVSLCEKCPTACLECSSPTQCSSCSKGYYLDNGMCYQCPIGCSLCSGPDSCITCERNYGVVVYGDSSWCSPCTTIRCSSCQVGTYLSNGLCSACPNECTTCNTFNECTGCKDGYYLENGKCVLCSNKLKGCTSCDITGSVCYECTTRYRLSQGLCIGCPTERGEGVDMCNNKGWQTICQYGYIDPYGGCEKCNGGDACLTCTYKENRCQSCKDGYYLNRNKCDKCDVLGCAWCQDDHTSCKRCKEGYLLKNGECVSCTELPECEYCSNECKRCSKGYAFDSQHTCTKCSNCXXXXXXXXXXXXXXXXXXXXXXXXXXXXXXXXXXKIEEESNGICLLCSIKNCKVCDCNLKTCIVCEDGYVYDSYTKQCTVKPGDLCEVYKTSSCIKCRDGYAVDYINNKCIKCGNNCKTCRYTNGHFKCLSCDSSLNLYLLNSQCVSPTNEKCNVVGFDSCRSCINNTKVVDGECKECSGHCLRCSQDECLQCDTSTILQNGKCAENLDCLITNEYGSCSKCVSTKVLNSETSLCESCPENCKECLSSTNCHECMNGYVLYNQTNCIKLANTKLRLKRLTNSLIHHCEKETTVGCQRCDSGYYLTDILMCDPCIENCEQCNNPTTCQKCSSGYILNNSVCVKQGRKGCKVITQNGERCAICEDGYFYKDGSCEKCDSSCLTCSKKSLFCLQCAENFYFVSSNTCYNYSTIEYCLAANDNGCTLCENGTYLTNYDSLNKAYLPYHHCLHCHEYCLECEQGSGICIQCDYTHALVSGKCVNASGIPHCTTIKNSICVSCEGGYQVDEDGLVCLEKSKSVVPIAVSLVSLGVIVGALLLFIIIIFMVFLRRRKIQQEKEMRVFLMKRSNVMFKQVPNSPICISKTVLHFDETKIEIPVNKESKDLICIGNLDKRKLKIQMTSVESCKYEIRTDPSVVELKHGEACEFQIFITPYCTCSINNSIKLVYLDYKEGIQKDIDIGINTQTEMSPFIDADELKEDKFLGEGSFGMVYKGVYRNITVAIKKMKTNDIDEMEKELEMLNKVKSQCIIRFYGCVQTNGNVSLVMELAEFGSFSDVIQKKNLKMNLRVYLDAAKGVEYLHNNGIIHRDIKPDNVLIVNNNIDADICGKLTDFGSARMINIIRKNRTFTSGIGTPIYMAPEILNGEHYEAPVDIFSMGVMLYEACSFIKPYSNKVLFPNSWSVPMFVQSGKRLPQVEPIQDDCFNVIQKCWEANIDLRPDASHLVLLAKALYQHYSSLAN

SEQ ID NO: 227 - protein, 461 aa, Entamoeba histolytica
MIFTLLIPLIVAQNPECSSAYCSSCKTNPNVCDLCAQNYILVDGKCKYFKEVVPYCAISAKDGCSACMSGYYLKDGKCQIPPNSLCASYKGGKCIVCVDGYYAKAGECFECVDHCYECSSMTQCFECLDGYGFNGDECVQSLDHCKAYSYGSSTRCRECYDGYGLNKKNQCEKCAIDGCYSCSLDYTKCDICYDTKHFDGKACVDFVPIEHCASYTDSLDCSYCADGYYLDEGKCKACKVELCDQCKSPYTCNKCQEGYYWNEKECTSCPAIPIGCVGCSGINKCSVCKEGYHLVGSYCYENVEHCAVYSYEQCKTCEEGYYLSKDKCLKGVEHCKRHSTDGKKCVECGKGYYLTEDFKCSKCDSKCNECEHKSTYCELDSLDENKEDVHPIRMAHCTRASADGQRCMSCDDRTYLKDGKCVECGDEKCYGCTEDNKCSVCAKTQEDFFNGIVYLPNNNHC

SEQ ID NO: 228 - protein, 407 aa, Giardia intestinalis
MFCKLFWINCLLQLAWAACLEQGNGSGRCKAGMCNVQLGEGDDGKYCSECHATGDFIINGVCLQANDNSACKANADKGICDSCAAGYFLYKGGCYKFGELPGKLICNDVAAAPGGRAAVVGVCSECNTAGGFFKHPDAVATKQSCILCNETENISNVKGVVGCSACTPPKTAESLTPATCTKCASPKYLKADGTECLTDATKCTTPAEFGKADSSAGNKCVSCGDEAAGVAGCAECTAPTEPTNKPTCTKCSGDNYLKTVDGTTTCVTKGDCNGGYFPNDSVDSKKQCILCGTVANNGIDGCTECALLSSPSRAVLITCSACVSGKKPNTDGSQCIACDIDGCTRCSEENKCSQCGDGYRLEGGTCVRTGGGNLSTGAIAGISVAAVVVVGGLVGFLCWWFVCRGKA

SEQ ID NO: 229 - protein, 596 aa, Giardia intestinalis
MCGLAVQSNCSQCVTPAEYLINGACSTANTNDACASGQPTDGTCKSCKTGYFLYEGGCYAQSSPPGNIICQAAGDTAGVCGECKVANGFFKNPDTAAKQSCIACNRTEPMGLVVGVADCSLCTAPSVEGATSPKAVVCTKCDTTATKYLKKADDGTTTCVAENQCDVSGTAYYKVSDATKGNKCISCSDAAGITDAAGETWKGVTGCAKCTKPGSAGAAICTECQADKYLKAGDTPSCVRGADCNTEFFPVVDESENNKKVCVSCGTGNKGGITNCKTCSPKTSAAKEGAKITCTECTANNLSPLKDECMATCPAGTYVKNKVCAPCHASCASCQADDTETSCTACYPGYSLLYGTDGSSATGRCVKECTGEFGVHCITGQCDGVVGGSRYCKKCEHGYVPIDGVCTATGAVRSTSMCTAGEGVCTGCTGDYALLSSGCYNTKKLPGSSVCTAASNGACTTCAANSKAPAGGSSCPTCPDGCAKCSDSSACSECLPGYYKGTGNKCFKCTEGDNASSNAITGVESCVSCAPPSGGAGGPVTCYIKADNNSDGSGGDTTNKGGLPTGAIAGISVAVIAVVGGLVGFLCWWFVCRGKA

SEQ ID NO: 230 - protein, 820 aa, Giardia intestinalis
MFSFPLLVLVTSSCGSVANRYYNRFGVACEKDNDNCAQDRCILVGLVSACTQCNPGFVPINGTCTAYPTDASSICIPDNASSPTRCTECKSETNIFLFYGGCYTIITSPEGNVGNYICSQASDGKCTECNTTGLGKYVFTNPDGMADERCILCSDTVGFGGYKGAFGCLDCIQPVNNKVGIALCFTCNTVEFAPIDYQCQPKGAHNCINGYCVSCYKTHLLYKSGCYSRHSATGLAICAESNQYELDNITICKECADSSYAPKSGVCSSTKNSAFPACTKDANRGLCTGCSSSASAFLFYGGCYDRSSRIGSRLCSQITSGTCSQWNDNFKFIFAKGGASDTNRYLCGSAADSGVSGCATCSYEGGAVKCTRCAAGYLGVDGTSCSNSCIGNTLGECSDITEQGGSSPVASCKCVCKPGLYNNSGTCAPCTESCAVCKNGDPNGCQQCNPGKVLESLVVTSDSARCVAECTVGSECAECGITIEGSRYCTRCKDSGMYPLNGVCITDSAQRDAYCTSRASGACNTCSSAAFLMNGGCYKSDYYPGSAVCNAQSGGKCTQAKEGYGMSADGKLQPCGPACLRCTAPGPGLCTECLPGKYMKRVPGAAAGSCIDPDACVNGYYISGNACLPCAVVGCKVCGHVDFCQECAGELFVSLDGRSCQEECGGDHVLGDVSDGVRRCWCERGFLPALDKSRCVEAVECPAGMEWCAMCDASGACLSCAIAGHNIQADLRTCGPGCGDHASPNQGTCVCEVDAVFEGGVCVPASTPTRRKTAAIAAGATVGVLVIGALIGFLCWWFLCKTKHAGVSSNTTTLIRSKSA

SEQ ID NO: 231 - protein, 125 aa, Giardia intestinalis
MCMGGYFKTSSNTCTKCDKSCATCTTAVSTCDICADGYYKSSDKCIACDKGDASITGVRNCVDCAPPASKTGPVLCYLMKGDVIDPGKKSSLSGGAIAGIIIAVILVVGGLAGFLCWWFICRGKA

SEQ ID NO: 232 - protein, 470 aa, Giardia intestinalis
MILAWMTLAGALASCREGILDGDCFLLSCDVILDQVYCSVCTAMTEFLIDGQCLPNNVDNTCRHSFGNGTCDSCAGPYLSYRGGCYRVGEEPGNFICKPEDVFYVDGTALCRKCVVYGEFPIDGSCTKKAHGNRCGTKGYEGTCESCGTGYFYHNGGCYLKNRFPGNKICADSSAIEHVGHCGTCLDGYETYKGECLACEDANCRKCGISMSDCEICHDGYYLDRDANEGKGVCVPCSPANNCETCIADGECISCVRGFFAGFMGPSGQCFSCDKGGDGYTGVPHCQTCLPPHPNTPDLAAFCTECADGFYLLVSDDRTQTRCVASCPKDKVRYSNRCVTELQGCHNYGRNDECVKCVSGYRLVDGICERCEVDNCEACASSSSVCDTCEAGYGLEDGACNPCGKGCRTCNGDTSVCTMCLVRWEYISPGRNCCISTCPEHSSDVYDGELGSCECHSNYKPSDDGLRCEQ

SEQ ID NO: 233 - protein, 131 aa, Giardia intestinalis
MRVTTTPAPGPARTTRPAGACDAIVIGASGEMTYYCSLCGDSTKIPIDGKCVPSSSANGNTCENGVCKSCTANYFLYMGGCYKVDTTPGNLMCSKATTAGVCDTLNANSRYFAVPGQQTMTRTCRSPLSVL

SEQ ID NO: 234 - protein, 842 aa, Giardia intestinalis
  misc_feature (448)..(448): Xaa can be any naturally occurring amino acid
  misc_feature (528)..(528): Xaa can be any naturally occurring amino acid
MFTYLGILWANIVVGSVEQYYFMFSFPLLVLVTSSCGSVANRYYNRFGVACEKDNDNCAQDRCILVGLVSACTQCNPGFVPINGTCTAYPTDASSICIPDNASSPTRCTECKSETNIFLFYGGCYTIITSPEGNVGNYICSQASDGKCTECNTTGLGKYVFTNPDGMADERCILCSDTVGFGGYKGAFGCLDCIQPVNNKVGIALCFTCNTVEFAPIDYQCQPKGAHNCINGYCVSCYKTHLLYKSGCYSRHSATGLAICAESNQYELDNITICKECADSSYAPKSGVCSSTKNSAFPACTKDANRGLCTGCSSSASAFLFYGGCYDRSSRIGSRLCSQITSGTCSQWNDNFKFIFAKGGTSDTNRYLCGSAADSGVSGCATCNYEGGTVRCTRCAVGYLGVDGTSCSNSCIGNTLGECSDITEQGGSSPVVSCKCVCKPGLYNNSGXCAPCTESCAVCKNGNPTGCQQCNPGKVLESLVVTSDSARCITECTVGSECAECGITIEGSRYCTRCKDSGMYPLNGVCIXDSAQRDAYCTNRASGACNTCSSAAFLMNGGCYKSDYYPGSAVCNAQSGGKCTQAKEGYGMSADGKLQPCGPACLRCTAPGPGLCTECLPGKYMKRVPGAAAGSCIDPDACVNGYYISGNACLPCAVVGCKACGNANVCQECAGELFVSLDGRSCQEECGGDHVLGDVSDGVRRCWCERGFLPALDKSRCVEAVECPAGMEWCAMCDASGACLSCAIAGHNIQADLRTCGPGCGDHASPNQGTCVCEVDAVFEGGVCVPASTPTRRKTAAIAAGATVGVLVIGGLVGFLCWWFLCKTKRGGVSSNTTTLIRPTSS

SEQ ID NO: 235 - protein, 1622 aa, Giardia intestinalis
MTSLLFVLTASLAALCGNTGYDCGTHGTCTLVGEVYRCVCAPGWTGYDCSRCSRGFASLGENCVSPNCIEDGIECGGRGTCLYVRSKDTWECGSCPTGFYQYSGRCVSSYCYHDEEASGVTTDAPCNGRGVCTFEGSLEADRVKPNMYVCSCDMIHTGSQCQNCDPMYGMIDPMLRTCVAKSCYDRDDTEPCQGRGECVMNVQLHPLTGEYTTGYICRCGYPYMLVGTAKCLPINCVSEQAGVATECGTGGICEQSDSGQFSCRCLTGFVQLTDGHCTAPTCRQSESSLACSDIGACVSGGEDPTEASTYYCQCPMSYSSGDYCETCDNQRGVTVNGKCVPKSCVIDNTVCSGNGDCVAEGLFAFKCKCHEGYEAHGTNVCAKPGCWDPIVNKTCSGAGQCTDNGCQCNSGFTWRSSRCIPTTLISGAWVCSGNGTATLSSSSANASDPSSWTCDCDLVTKGNLCTECNSERRPYAAYMINGACTAAACVSDTTASTPVVCNGVDGATCAQYGVDGDSIFYCKTPSRSQYLVAFNTSFVVHRGCTYPSKTKYPLNLYCGLLDGYTMDVYEDGAPQCLSALTSSCSCPDSFNFVSVEDTIQSELGETQYRTSCIHKNCLNPDLKGTTDESVLQNPDSYCNGLGDCLMDEYGDYMCFCEAGSTYFKNTCVSNTCLTQDSETGATTVCGGLGTCALDSYGHWGCVCEYPYFGSGSSCYPIGCGYYDPLTRVTLLCGGEGRGTCTTNAIHPELASCSCNRGFTLIGSNYCAPSACTAYGADKEGVEPNLSYVCSGVGECYLDPLTWNYACHCGEGYYATGPYCTLAQCIVVIDAGGAIPGLVGDLWLECGFAGAGTCSTDGCTCNDGYIKTMLHPMCVHAGCVDENNVYCGGDHHAACIDKGDGTGFTCTCTTQYTNVNGTCAPKQCVTKDINGNNVVCGGRGTCISLWTSHTCSCDNGGPAVQSGDSITCPHPDCYASVGDELVVCSEQGNCKETATGGVCVCNNGYSLVGSSQCIISECVQKDGNGMSSICAGGQCVSTNGVDSCVCADGFSKVDGRCVHRDCIDTLDGEQIECSGFGKCTAVGSSYKCVCNSGYSSGSAPNKCFSFACLSSINGQNYECGGHGKCTYSEETSAFICVCDDGYTTVTGNFATQFCVASGCLTTSDATQTVCNGGGSCDPTNGRCVCDEGFSGDTCASCAEGYIRPPEEYLFNHCMKTACADSTCGGTGVCAPSLLYNQMVCECAEHHTAVNGRCVPCAIDNCETCDISQLGRICYMCKEGTYLSNDQTQCLPCHADCKTCSGPQSTQCLSCVEGKVHSLNGMGASSCKDECKTNVDGCRSCGAVISKTKYCSQCQSQTSVPVNGECKSQTTRSIKTQAAESAECARYSNGVCLACADGYFLHDGGCYETTKLPGRDVCSSATNGTCSYCRTGYSELNGECVACKDENCATCRSPGTCSVCKAGWSLSGDNCVSCAAECETCTQRSPDLCMSCKDNYFTSFSFAGQTSGPCRPCSDTRSLNGIIGVPGCNYCTLPVTNGTDENPVPVICLTTESANNSKMMSSGAVAGITITVLLIVGGAVAGVLVWFFLFKNRKGSAKRNARRRFHPDETSTSLLSQDYGSSMI

SEQ ID NO: 236 - protein, 721 aa, Giardia intestinalis
MVASIYTALTLALAVATIEASIAAGCTSDNDCGGGSNSCSITINNLKYCSKCAAGKIPINGVCVSSGDAKGNTCSATGCTQCTKGYFLHYGSCFNLDTDSPGNFVCDFVDDENEQLVDGYCTQCNQDGYSDNPKKSSTTQSCVACFGTDGVSGCNTCTAIPDTSNANGYLVICHGCSDKDMIAINNKCVPIGGVEDSISGCVHYSSSGYTSCSRCGAGFLQYASTCLLANGDYATKICETSNQIHVADTICCKQCKNTDLAIIDGDCSTSNFQCTCSGGSCTQCHGKNFVYHYGGCYHIYSTLALSICTGGVADGGKCLQCNTSQASGLFANPNTNEIQACISCGDTDKGGVANCMECSYASSTVTCTKCADGSTPTNNQCNPVTPPGPPVGNCNVLACKTCNTTDTTRCAECHKRTYLGLDNTTCVSKCSTQNSGQDHYYGNSSTGACEKCHSDCQDCTGPGQNQCTACVPEKYVPGEVGSCISCSSTQSGTAYTGIQNCVRCHKSDYITTDLRCTACTTGMVPNFGHTHCISATTCSTANCELCQSGPSTCDRCSENFFLTPDSTCISDCTTLGAYVGNTQTRKCIQCTEGCVSCNSDLRCTSCQSNYAIVNDMYCFRCDSVDSNSLITGISNCIKCRAPSIGHGSVHCLEYGSQPSNNAGSKNLTGIAVGTTIAVLIVAGLIGFLVWWFVCKRKPTKAGPLNTLRANSSAVGSRVGLM

SEQ ID NO: 237 - protein, 673 aa, Giardia intestinalis
MVGEVEVCTECKNTGNVPINGQCTTVANAANCKKVGGGELDPNAQTCGQCTDAYFLYKGGCYQIGQSPGSLICADKQASGTTGTCKACVEGYFTVSSATATQDSCVACGDENCATCTEGTTPQKCSKCKAAGEKLYLKKESSGTGTCVSAVECTAAGSYFPDSTSDPKECKACEATCATCAGAAASQCTSCKTDKPYLKKDSPTNPAGTCVAADGCGDGSYADTSSKECKACHGDCAACTGALETDCTSCQESSKYLKVLDAENGSGQCVAPSACTGTHFPVTDDKKCYLCNTANKGGVTDCQTCSKPEATVVCSACTTDTNKPNVAGSACVACSVANCASCDNANVCALCTNGQPPAGGACPSCADKNCADCTGGDGACKACKEGYRLSGGACEQCTVASCKACAGSKDVCEECMQDTVLSPSKLACSATCPVGSYTSGAQCLPCDASCASCDTEGPAKCKSCYPGYVLSYAADGATGTCIRECTGAAAAGCESSMCNAKIAGSSYCSKCVAGQAPINGICTSVTRSARDATGCAPSGGQCTACTGEYFLQFGGCYEKTKFPGNAVCTSIGASGKCSACVSGQAVAGDGTCPSCADNCETCAASTPSQCTKCFAGFYLNTAKGCTPCSADSAPITGIKNCMSCDPPSSTQGAVTCYVTQDPTVDPTDPSVNK

SEQ ID NO: 238 - protein, 520 aa, Giardia intestinalis
MRLHSTNVLTPAYHVRLSHPASRMTRYHPVTRMLIDVPSATEACVCSLFVYSTGASLCNGRVLNYRVTPRYCDLDVRKASLDGRYSTTGAGCPAWCGRGRFSSVADAVRGRSRSDSGRADVCGREGLHQVHPDGSATAVTCTKCAKGLYLKTDGGATSCVSATECPEGQFPTTDDTGQTICVSCGNTAKGGIANCQTCSPLTSVSRSSTVFIKCTACSIDRLSPLGDACLADCPYGSYEGSPNTCTPCHPLCASCNDNAGADSCTACYPGYVLSRATDSPIGKCILECTEEFGANCETCTADIVGSKYCSKCKSGYVPVDGVCVPVTQRTIQECDPSAGVCTACPGNDYVLLSGGCYNTQTFPGSSVCLAATGGKCTDCTNSQAPDDKGSCPSCSEGCSLCPSGPETCLACFSGYYKSGTKCFKCTNSNANGSPTVAGIPNCVSCIILPGSSTLTCYVKIDKGDDTKKNAFPASAIAGISVAAVVVVGALIGFLCWWFLCKTKRAGVSSSTTALTRPTSS

SEQ ID NO: 239 - protein, 261 aa, Giardia intestinalis
MCTAVLGGSKYCSKYAVGYAPIDGMCTKVATTRRDTSVCTASNGVCTACTGANYTLLSGGCYDTQALPEMAVCTAATDGSCTTCANGQSANSGVCPACAEGCSACNAGQTQQCTKCFAGYYLDNTAKACKKCSENSNGITGISNCVNCTPPTSNHKAITYCSKIDSSAIGTRGDGVDKNVFSISVVACASSLSTLTIGGLAGFFVNDRPVTIAGMSLLEETDQSTVYESASLCNVPTKLLRRRLSKSFLERTKTSTSAHKE

SEQ ID NO: 240 - protein, 941 aa, Giardia intestinalis
MLLLLLLTLLATVVCAQLDPCAYCLYNKCLQTEHGSLCTHCEAGYAPLEGQCTIVDDSFCLVGSASGGSCSQCGYGYMSFLNGCYSAMAFEQLSKVLGNKVASTSTSYASNHVFLNGQALFTGCFMPDELPINGACTEDTDKWCSQSGETDFSYGTSCLTCTGTDVFYFKGGCYSTKTEPGKLICKTASDGICTACNTDHNHVFTNPGTSTKKEHCISCGDGYGDDEYSGVENCGTCTAPSGSNKKATCSACPDGYKFNVAKTQCFTCALQGCLNCDGYNSCEKCETNFYITEQSYTKICVTTCPTGTFPFVDSAGNKKCFSCSTFDKSDAITVERIPGCGACTVSSNNRLTCSTCLQGYQLTATGCKQICADVSGKCSSDACTVAIGSMSYCSNCGNTSNYAPINGVCTYVTVNDKSGCREQETITGVCSRCGEGYFLHKGGCYKADQAPGNLVCSSVGTGSMSPGNIGAGRCSICGPGYRGKKGFCIPCDNQHCLEYISDTCVCTACENNVLLLQGQCIPLPDSGCKVPYCSLCEESREVCTRCEGSYYVTPLNGCVRDCGDIMGYHNNADLGKCVRCKIKNCYKCSDSTRCLECSTGYGLTDDQQCTQCPENCLACSHYNQCTTCKSGYILGDSKVCESESDYRVDCAESDAKYIKYELTRHLKGSVLQRVTASMCSKCTPGKVPINGKCVSASTRTLRCTPGTGEDAGKCTSCSGSASNSAFLYSGGCYDRETDVGRSICLNVGSNGACAKCSRGFMFDTNRGECTPCPSNCLKCTSAGCLRCDPGWLRHEDKCVVCKKGCLECNTSPDKCTSCTTGYYVAGPTTSSGGNVGPCRSCDDTREVDGWRGVNGCTICVPPVFAGEVLCLSKEKIIDSSSRSLSSGAISGISVTVVIVVAVIVGILVWKFACKSKSSGRIRLVDMDVSINTSQHMSSSYV

SEQ ID NO: 241 - protein, 1609 aa, Giardia intestinalis
MHTWVFALIICTSSNHHHCLHNSNRYLMNDAPCHLPGKSNATTHILFEEAPDCPENCASCTDPSICEVCEHGFTLTNRGRCVDQCIEGDSETNCAVGHCTVFDDTLCSKCAHKDDVPAAGICNTGVTKCTKDDLGVCISCEPGHLLYQGGCYPSKSALAQSICTTDNQIVIEGKLYCSLCSNENEAPINGHCTDEFPSYCNADGGRCTSCIADGYFLLEGGCYSGAEHPGSVICAEVHDNECTECGSHYPLTAGVCTYCPIDHCLTCENESCSQCQKGYVLRSSGRCVKLCSEGNGLQSCAIGYCTAFGGTLCTKCAYEEDVPVAGICTSELTTCQKNSSHICISCEQKHLLYSGGCYATTGSLGLEICSLEDQINIGDKVYCSKCNQENEAPLNGECTETAANHCDVLDGVCTSCKTTGYFLFQGGCYTLASIPGNIVCAEVSGTTCTKCRDGYGIHEGECTPCAIEHCMDCNDNIADCNACDPKHFFTGAACVACEGEHCAACRENMCVDCTDKTECHACTIPNCVLCDPTSVECLTCQEAYELDEDGACTPLPASECPSSCLCTNNDVPALCTSCKPGFIAAGLVSGDTCLSCALEVENCGLCTYISESESIVCEECLDGYRMNNGLCEPCGKGCKSCPQRANKCEECFAETPYFNPALTECLATCPPNSVAVANKKCSCIHGYYSTLQGCEPCDESCDTCSGGEVDKCVTCRPGFFLASGSWKGQCISCHVGAFSDGSIIGVEHCSKCKGVPQNGDLVVMCEECDLGYTLKGEVCVSDDAGHEDCPSNCICTAESPACVSCQKGYFTLSTPSLETCIRCSTAVSGCKACTVEDVPLSRNTKDVVCTLCDDGKGLVEGECQSCHVTCKTCNNNPNLCSACNNPTYKLSLKGDQCVQECPEFSEEQNGRCVCLLGYSISSNGLTCTKDTSACPSVCICAVGNICSGCTDGYFTFDPSRTDAARCEPCSGDFCSSCGSVSNDAAVIGHSLGSNRRYAYRRSTKSINICVDCNDKRGCSACSIEGCNKCSTADHTECTECMPDYQLSQDKKSCEPLVPICPLGCTCTPGTSTCNGCADGYFEVDSADETNGRCMRCSIPTRYIPTRISRARRIQQLLSVRGKEIDQIGWKVVRDAAWDGVAGCALCKPPSSPGPAICTQCVQGKHLWVSGESTQCLDACPDGMGSINNVCFNCNDQNCLRCDNNLDSCTECRTGASPILNPETELVVCETVCPLGCVCEDAENSNICTGCQSGYYEVSVLARLVMRLRQADVHCKACLANCMTCTDGSTCSACADSYVLHQTGASCVQKCDQGYYDKQGKCTRCSDENCASCTSETTCTSCIGSSFLSGGKCITCDESCKTCGGSTKKDCLACPAGTVHSVGTGLGECLQECSATAAGNCALCNAIIDGTRYCSKCVPGEAPIDGRCELISVARNVACVTSGDGTCTSCPATHFLFNGGCYATSRYPGSAVCTSSSNGLCTNCADGFTSTNGICSNCVSGCSSCSSAAASACTLCTEGYFPAFSGSQGVCKRCDDTTITNGYQGVQNCRICVAPQQAGPALCLDASEISNKSSLSAGAITGITIAVLAVVGCAVGLLVWFLCCRRSKAV

SEQ ID NO: 242 - protein, 144 aa, Giardia intestinalis
MDGGCYETGKYPGKSVCTSAPTGGTCTSLASGYYLNSGTLVTCGTGCAECTNSDSCTTCADGYVKLNNAQTCTKCNAGCATFTGTASTCSTCADGYYLSNSKCITCDKSDGSITGVSGCLSCAAPSGSTGPVLCYLMKDSTCWR

SEQ ID NO: 243 - protein, 429 aa, Giardia intestinalis
  misc_feature (257)..(257): Xaa can be any naturally occurring amino acid
MFPVIWCLIVNALAVACSGSQTNCATDMCETINGVEICTQCVEGYAPVNTGCTAHATANTNCKKKSADLTAQSQICEKCEGSYFLYKNGCYQVSSSLGTTLCALADGGVCTKGTPGYFALPGAAPTEESVAPCNATAEITLANGKKYTGVASCATCTQPSAAEANTPKAATCTACETTTPTYLKTVDGVTTCVPKSDCNNGFFVEENATPKKCTACNDNANCVACTGSSSNQCTRCKADGTKPYLKKEGETDAGSCXDITGCTTGALYYTDDTDTTENGKTCKKCSEGVANCEQCTAPAQGKTKPACTKCTTPNYLKTAADGTTTCIEKTACKDDFFPKEDNSNGHKCLSCGDETSGVPNCAECTAPSQEGEKPACSECGSGYKLEGGACVSSSANRSGLSSGAIAGIFITAVVVMGGLVDFFSRAVRL

SEQ ID NO: 244 - protein, 283 aa, Giardia intestinalis
MAARRRFRAVMLIAFLLICAVIRADCASELTTAGCSTCTSDGQTCTACTNSAYNVQLNGKSCAANCPEHSTAKQNICQCDDGYSLNSAKTACERSVSAGCASELTTAGCSTCTSDGQTCTACTNSAYNVQLNGKSCAANCPEHSTAKQNICQCDDGYSLNSAKTACERSVSAGCASELTTAGCSTCTSDGQTCTACTNSAYNVQLNGKSCAANCPEHSTAKQNICQCDDGYSLNSAKTACEPSSTNKSGLSTGAIAGISVAVIVIVGGLVGFLCWWFLCRGKA

SEQ ID NO: 245 - protein, 640 aa, Giardia intestinalis
MQCQTGKVPINGICTETTQPDATTNCKKENDSPLDGSDQTCGQCVGTYFLYKGGCYLAGSGTGGKLCTSATDGVCKTPADGYFIPPGATKADQSVVACGETTEVTLKDTKKYKGVKYCTRCAAPPAAGDAGTAAVAICSACEETHSLNQQDNVCNALPSFQCVSGKLEPLGDTQVCTQCSEGYVPINGICTAKDDAANCKKAGGGALDSNAQTCGQCTDAHFLYRGGCYDSAQGIGKKLCTKAAAGVCTTPAAGYFVPPEAQSKDQSVLSCGETTDLVLVSNNKKYKGVAFCSACTAPSPAGDVSTAAAAVCSACQSGYDLLQEENVCRQSNGCAIPGCKTCSSDKKTCNECESGKHLTPTKEACLSSCPAGSYTSGSACSACDPSCATCAQAGADKCTSCYPGSALVYSTDGSAGTCIPECTGAFAEHCAANSCTGKIGGSNYCVKCDNGYAPIDGVCTAVGGAGRAASACTPGDGVCTACTGNYYLLSGGCYQTTKLPGSSVCTEVKAGQNGQCQTCANGQSANGQGVCPSCPDNCATCSTTSTCSACFSGYYLTADTCTKCTENNGEVTGVTSCLSCAAPSSGKGSVICYVKTGSNSTGSGTNLSSGAIAGISVAVIVVVGGLVGFLCWWFVCRGKA

SEQ ID NO: 246 - protein, 923 aa, Giardia intestinalis
MERRQTTLGLPASMPPLPPPVRIEGCKTCSADKKTCEECAENKYLTPTNQCISNCATIPGYYGTAENGKRVCKKCGVANCVVCGATGACDLCTDGFYGPSCSKCHESCRTCSGGAGADKCTSCMPGSALTYGSAGNTGTCGEGCVQSSESGAGKCETCGLTVEGTKYCSKCKIGTEYPQNGVCATKPTGRATASCKDSNIANGVCATCADGFFKMSGGCYSTGQLPGATVCAQTQAGGTCKTSADGYKLDADTLTTCPSNCKVCSSDTACTTCADGYAKLTSATTCTKCDAGCATCAGIASTCSTCADGYYLSNSKCIACDKSDGSITGVSGCLSCAAPSTGTGPVTCYVTQTPAVDPTDPSTNKSGLSSGAIAGISITVTTIIGRPVDKMSTYIIHTSVSAIVRPIQSPYPSPKTSVADKHSRMPTPATGGSSVPAFTAKDICKRIDSVLGRGSLGTVYSIKGHPGLAVKEIPIDEQDEGSVNTIRSELATLPALSHPGLLKCHQVVEDGSFIYIIVNRYSRTLDGLLIEHKRARTLISGETVFSILRQLADALAHLHGALVGNASGTTACRTAHRDLKPTSILLSGDGECIAIAHLGRCKDALWPEGAMDGPKPYMAPEVLLEGRTISASDIWSLGVIIYELATLKRLDFLEGKEPKDVFINGWRPDLSAVEDDSIKSILERIFVLAPVKRPTARDLCELLRVSDASVVRMRLRAMMLEEALNEANARIASLEKELQTKIDDLERRFTGVFETLPKHDMQASAHHTSASAPLSAAVSPALPALEKSVSCTPLVHAAIAGDAKAAEGRLSGDDQMNDSGDAVSVPATGTSGGDGAEPLNPAGDHAATALMSAAERGDVEAVRALMPLQKEWRANLFGSGKTALMMAAMCGQAEVVGYWWSTRAVDRIRAIRLLLCTQYMITT

SEQ ID NO: 247 - protein, 195 aa, Giardia intestinalis
MYAEGYMVDGGRYGTPVRVRAASQCTQQANQQNCEANSCNVQIGSNVYCSQCKTGGNVPIDGVCTAKDNATDKCMKDGSTPIGESNTKYGFCPSGYFLHKGGCYKKGQQPGQTICTDTSSTLGPCESCASGYFNNPAATDNTKESCIACGDTTGDTTNSNKGVQNCATCTVEGAGTTGKTAKCISIANPSRETSS

SEQ ID NO: 248 - protein, 401 aa, Giardia intestinalis
MQTADTPAPTNGPRSCVTENCKTCSNEGQENEICTECEPTHYLTPTSQCIDECGKVGNYYNGMNDNGKNACRACAVANCEACDEQGKCILCKDGFYGKACMACNSACKNCEGSAVDDCVECPAGSALKYGGAGDKGTCEAQCKATTGSGSGNCEECGLTVDGTKYCSKCKETNEYPQNGVCATKPASRATASCKDNAINGGVCTQCADGFFKMNGGCYSISQLPGATVCTQTQAGGTCKTSADGYKLDADTLTTCPSNCKVCESDSVCTTCMAGYVLTDPTCTKCTSGCATCAPDATTCTACLAGYYLSKSKCIKCDADDSSGILGVAGCTACTAPTSGTGSIICYAGPAIDSPTDDPSDPSVNKTGLSTGAIAGISVAAVVVVGGLVGFLCWWFICRGKA

SEQ ID NO: 249 - protein, 159 aa, Giardia intestinalis
MVKTAVDGTTTCVDKAGCTTGQTHFVEGSTTKACIPCSDNTKGGILGCKTCTAKGQCSACLEGYFGSNACAPCGANCATCTQAGDDKCDTCKPGYFKQGDSPGTCTPCDDTASGIPGCAECTFSGSLACISCKPNYKQSGLDPVTCTRTCEDDSACEAH

SEQ ID NO: 250 - protein, 472 aa, Giardia intestinalis
MYMGGCYQPSTAPGNVMCKAATEGKCDTPADGKTYFVVPGATKTDQSVVACGDTTGVTVDTNKKYVGVDGCAKCDAPESLSAAGTATATCTECNANLYLKTVSSPTPTKSCVTEAACKEGSTHFPTTDSSNGDKKVCVSCSQTSNGGIADCAKCSLTTSPAGAGAAVTCTECDSTKKLSPLKDACLDGCPAGTYEIGDTNKVCTPCHASCAECNNNANQDSCTACYPGSVLNRTTDNGSTGTCIPECTGRYAENCKAGMCTADIGGSKYCSKCKSGFVPVDGICVSAGTTRVALTGCTSKGDGTCSACTDKYFLESGECYQSTAYPGNTLCSSAADGKCTTCANLQTPDTNGSCPLCAAGCDMCDTPKTSTCWGCLPGYYLSTDKCMKCDSDDGSITGVKDCVSCDPPDSNQGSVTCYVTQEPTVNPTDPSVNKGGTSLSTGAIAGISIVIILIIGGLAGFLCWWFLCHKKK

SEQ ID NO: 251 - protein, 300 aa, Giardia intestinalis
MLLAIYFTMGALAIECQSGEAAASKCTSGKCESVGDTQICTSCETGNVPVNGVCIAHGEATVTGSGCTKASNGAAVDQDDTQCGKCGNGYFLFKGGCYDASKAPGNLICSTIEESAPGMCKTCAPGYFKNPASTGNDATKQSCIACSDETGANDNTGVANCATCDPPETPGQNNSPQKATCTKCDQTKYLKEGACVESSGCAPDTEFAKQDSVNGNRCVSCGNTESGVDGCAKCTASSGESTKPTCTECNNNKIVKMEPSGTSCVEEAACVDGFFVETVSGTPSKKCTACADSNCAVCKK

SEQ ID NO: 252 - protein, 413 aa, Giardia intestinalis
MCETIGAVEICKQCKTAGKVPVDGTCTAYGTASTCKKSGGGSLDGSEKSCEKCEGAGIFLFMGGCYNKDNSPGNLVCTTVADGKCTTCTTGGSVFQNKATQPTTGRECILCSDNTGSDSNLGVANCATCTAPTTTTGTATCTKCVSPNYLKPDGTVCGEKGTACASNTEFGKEDSVNGNKCISCGDATDGVTDCKTCTAPSGESTKPMCTECNNNKIVKTVTASGKSATSCIEPAECKDGFFVNTADKPNKCTACTANCNTCSAAEANKCSICAEGYFVGAATGSEGPCVKCDATGSSGFVGVAGCTKCTRPNTSGASGTAICDECEAGKKPSEDKTKCNPCADTNCSFCDEQGACQKCSDGYTLEGGKCASSSTNKSGLSTGAIAGISVAVVVVVGGLVGFLCWWFVCRGKA

SEQ ID NO: 253 - protein, 410 aa, Giardia intestinalis
MQCGDKVGATLEGRTYAGVRGCAECILDGSATAVTCTRCAKGLYLKTDGGVTSCVSAAECSKGQFPTSDSNGGSVCVECSDTTKGGIDNCAECSLLTSKARSSTVLITCTKCSDNALSPVGDACLRKCPAGSYETTTTPDNTRVCTPCHSSCAGCNNDPSQNSCTSCYPGFVLSLRNGDPIGPCIPQCTEEFGINCEPGACTASIAGSKYCSKCKSGFVPVDGVCVPVTQRTIPGCNSGSDGTCASCTDSYFPQSGGCYNTQTFPGNRLCMDAQSGKCTSCANGQTADNSGSCPSCPDGCDLCDKSNTETCEGCFPGYYLSGTKCIKCNTSNESITGVKDCVSCAPPDNDQGSVTCYVIQPGVSPNDPSVNKGGSRLSTGAIAGISIVIILIIGGLAGFLCWWFLCHKKK

SEQ ID NO: 254 - protein, 356 aa, Giardia intestinalis
MYKEEMRSVQTAGTCTTSPEKCNPDACNVQIGNSIYCSRCKDESSEFPINGVCTNQKDDNTCTAGGVCTSCKEGYFLHKGGCYKKGEEPGSLICKPTGSTVGVCDECQAGYFKNPSAANNKQSCIACSDTSIIDSVTGVDGCTACSGPTLAGTQDAPKTTTCSACSNSKIVKTAKDKTTSCIEEADCTKAEGFFIDSTSGKKCSACNENCKTCSGAAAQCISCKTDTPYLKKDTDSDTGICVDAADCTNGHTYYADDTVDPTSGKLCRKCAEGGVTVCTKCEKIESGVVCKECPGPDNTIFDLGRKSCVAECPADSSPDTDSVCVQQGFRLFLQRTSGYLRCGYPHRRRVLCHKKK

SEQ ID NO: 255 - protein, 352 aa, Giardia intestinalis
MKEDRTKCFGSCLALGLGYYNNSGTCTRCIDNCVFCISGDSCSQCAEGYYLDTSAGTGVTTGTCKLCATGCSTCNGGAANECTTCLSGYYFAVSSKETQTAKCVLCNTTDETGYTGIQHCAACRSTVGNNGSKNVICQKCEDGYLKETDQGATVCTLPAPDCSVDLCALCVEGDATKCEHCVADSYLCPRTATCTKDCATCGASMYADEDLGECQPCNIANCQVCATGLKCDSCTADSVPVSPDVYHTACLGCDDTAGMNGWTGLAGCKTCELTDKGGGSVNCLDPGYYRKGGLGAGGTAAIVIVVLLVLAVAGFLVWWFVFRKRDNFPKRSRGGYTLLTKTDSYDYHQSLI

SEQ ID NO: 256 - protein, 182 aa, Giardia intestinalis
MNGGCYEMAKYPGKSVCTATKTGGTCQTSADGYKLDGSNNLVTCSRNCKVCNNDGACTTCMPGYVVSKSDCIQCAAGCATCAGTAATCDICTDGYYKSGSKCIACSKSEASIIGVSDCASCAPPASGTGSVLCYFMNSDVIDPDNKSSLSTGVIAGISVAAVVVVGGLVGFLCWWFLCRGKA

SEQ ID NO: 257 - protein, 128 aa, Giardia intestinalis
MPGYVVSNSACTRCSAGCATCTGSASTCDTCTDGYYKSGTACVLCTEDGAGGVITGVANCATCAPPTGGSGPVLCYLLKNDAGGDITAGDSDPNLSSGAIAGISVAVIVVVGGLVGFLCWWFICRGKA

SEQ ID NO: 258 - protein, 181 aa, Giardia intestinalis
MNGGCYSTSQLPGSTVCVTAPTGGTCTKSEPGYNVNSGTLVTCGVGCAECTNSDSCTTCASGYVKLTSAATCTKCDAGCATCTTAASTCSTCADGYYLSNSKCIACDKSDGSIAGVKDCLSCAAPSGSTGPVLCYLVRDSASVNKGGLSSGAIAGISVAAVVVVGGLVGFLCWWFVCRGKA

SEQ ID NO: 259 - protein, 350 aa, Giardia intestinalis
  misc_feature (328)..(328): Xaa can be any naturally occurring amino acid
MKEDRTKCLGNCLALGLGYYNNSGTCARCMDNCNLCEDGESCSQCVEGYYLETSDADPPQSTCKVCTAGCSACNDGTETSCTACASGYYLASNSRAERAAKCVPCGTDENGYSGIQHCVTCYSTLGSTGAKNVICQKCEDGYLKETDGGKTICETPPPTCTVPMCALCVEGDATKCEHCVADSYLCPQTATCTKDCATCGASMYADEDLGECQPCNIANCQVCATGLKCDSCTADSVPVSPDVYHTACLGCDDTAGMNGWTGLAGCKTCELTDKGGGSVNCLDPGYYRKGGLGAGGTAAIVIVVLLVLAVAGFLVWWFVFRKRGRSSXRNRGGYTLLTKSDSYDYRQSLI

SEQ ID NO: 260 - protein, 209 aa, Giardia intestinalis
MCVLATARELTAVCTPKNDGTCESCKDTYFLQSGGCYQSMMYPGDTLCELAQQGKCTTCANLQLPERDGSCPLCATNCKVCDASNAKTCRGCFPGYYLDSVDNKCVKCTDNSNNNGNTIVGIPNCISCVPPASGNGPVTCYVVQESTNDPTDLNTNKGSFSTGAIAGISVVAVLVVGALIGFLCWWFLCKTKHAGVSSSTTALTRPTSS

SEQ ID NO: 261 - protein, 446 aa, Giardia intestinalis
  misc_feature (268)..(268): Xaa can be any naturally occurring amino acid
  misc_feature (354)..(355): Xaa can be any naturally occurring amino acid
  misc_feature (357)..(358): Xaa can be any naturally occurring amino acid
MVRAEAKAQLGTDQCVEVTGGAANTCKTCGAIIGGTKYCSACNDSGSTAAPTDGVCTADNAVCSAKSNGVCTTCTGSSFMFQGGCYATANAPGNTMCTQAANGICSAAAAGYFVPPTADRDNSHQSVIPYGDVEEIAVKDNKKYKGVAHCTQCSTPATAVDTTNAKAATCTACEDGYFVENAACTQCHSSCLTCSAAGDSKCKSCKDGYFLGVTSGQTGKCVSCGDATGSGGWTGVTGCAKCTKPASAGPATCTECNTELYLKTLTGXTPTTSCVTAESCGEGFFATTVGSVKKCVSCSDNNNGITDCGECTAPSEPTNKPTCTKCTGKYLKTAPDGTTTCVEKNACTNDFFPXXDXXNGHKCLSCGDETSGVPNCAKCTAPSQEGEKPACSECTSGFRLEGGACVSAGGVNLSTGAIAGISVAAVVVVGGLVGFLCWWFVCRGKA

SEQ ID NO: 262 - protein, 134 aa, Giardia intestinalis
MAPSEPTNKPTCTKCNTKYLKTAADGTTTCVDQDKCVTDSFPVTNAQTGNKCVSCGDTDAGIPNCAKCTLSSGVTKPTCSECNSGYKLEGETCVSTGGPNLSTGAIAGISVAAVVVVGGLVGFLCWWFVCRGKA

SEQ ID NO: 263 - protein, 210 aa, Giardia intestinalis
MDSEYPQNGVCSSTTSRAATCNDGTIQNGVCNTCSNGFFLMNGGCYETSRYPGKSVCTEAAQTGGTCQTAAPGYNVDNSGNLVTCPEGCKTCSDANTCATCVDGYVLANNACLKCDASCLTCETEATKCTACASGYYKAASAAGPCTSCESNSGGITGVRGCLSCAAPSTSSGPVLCYLVGMSALLLVSQVPPTPCQYVTWWQSVPRSSE

SEQ ID NO: 264 - protein, 539 aa, Giardia intestinalis
MSSCHQSCVTCSGQDEVSCTSCNSTSFLALQDIDKGYCISCSVETSVNGYVGIERCLRCTLPSSTDTKPTCLECSELDYMVSIDGRSCVTSCGVGALPNYYTRQCACTNGYGLNRGDRAQGCVPCKVSRCSLCTANADLCNECEIPFGLSLDSQKCLAIGGCPANCVCVNDGTDLGTTCNSCEKNYFLQPVGRICLHSCPLGYALNPTTNNCDMCSANCYSCEEALETRCTSCISGYVIQRLNSDIPTTGRCIAECAEAAVGSCIECQAILGSAKYCSRCASAFFPLDGKCVSVPDQQPLLCISADRGVCFKCAVGYFLHQGGCYSSLYEPGKSVCAAAERTNPAAYGTCRACTHSYHRTSDGICISCTMEGCFQCSSSPDVCTSCSNGYYSTTISSSADEVRCNRCATGCLVCTDSSPSTCSQCAPGYFGPNSVYGCIRCDDSTVSGNLKGIKGCKQCQLSSSGASVICLDDNPDSSFTLPPLDTNKTTLVLSIVLPIIILILASSIIALVIVLVRRKKAKRLSPSIASVALNTVISG

SEQ ID NO: 265 - protein, 195 aa, Giardia intestinalis
MSTCSKCLPGYFLKTGSPNECVLCGDTAKGGIDGCAECSGTTGSLKCTKCKPNYNPSGEETNLTCTKVCEDETACGGTAGSCGAIVVDDDGSMKHYCSYCGESTKFPIDGICKGDSAKGSNTCDKGVCTSCTTGYFLYMGGCYKADQPPGNLMCTAAAGGICTTPTGQYFKVPGAASTDQSVLGCREPPRHDGKW

SEQ ID NO: 266 - protein, 122 aa, Giardia intestinalis
MGGYFKTSSNTCTKCDAGCATCTGTASTCSTCASGYYLSNSKCIACDRSDGSITGVSDCLSCAAPSSNTGPVLCYLMKDSTASNSDPNLSTGAIASISVAVIAVVGGLVGFLCWWFICRGKA

SEQ ID NO: 267 - protein, 276 aa, Giardia intestinalis
MCTSCKSGYFMHRGGCYKYDTEPGNMVCKDTTASSTQGTCDECQAGYFRNPVTPLAATHQSCIACNETTAVDYNIGVANCAECTAPAASGSSGSNQKATCTACADGYFISGGGSACTACNDGTNGVAECTACVPREDNPAKATCTACSGSKKPSLDGKSCYDCTVGNCASCNSKGACQKCDSGYILDGSSCIKNECTTSNCKTCTNPKAVNEACTVCVSTHYLTPTGQCISNCAALSGYYGDTDKTCKRCEVANCVDLQRSREVPDLQGRLLRRIV

SEQ ID NO: 268 - protein, 236 aa, Giardia intestinalis
MCTAVLGGSKYCSKCKSGFVPVDGLCVSAGTRAAPTGCTPSTTTAGTCESCKDAYFLQSGGCYQAAVYPGNMLCTTTDNNGKCTSCANGQTADGSTGSCPACDSTCATCEAANAKQCKTCFSGYYLDANKACKKCSETSSNIQGVENCVSCLAPTSPSTPTPVTCYVTQEPSVDPTDPSINKGGLSSGAIAGISVAVIAVVGGLVALTGMWTRASPISQTESDNRLLPGRLELFEQ

SEQ ID NO: 269 - protein, 232 aa, Giardia intestinalis
MCIPECTGKYAENCADGQCTAKIGSSKYCSRCKTGFVPVDGICVSVASRGRETTICTPKGDGTCESCKDTYFLQSGGCYQSTAYPGKTLCEKASNGKCTLCANLQTPDTNGSCPLCAAGCDLCDKSTTKTCSACFPGYYLSTDKCVKCDANSDNGIKGVTNCVSCDPPDSNQGSVTCYVTQEPTVNPTDPSVNKGGSSLSTGAIAGISIVIILIIGGLAGFLCWWFLCHKKK

SEQ ID NO: 270 - protein, 181 aa, Giardia intestinalis
MSTCSKCLPGYFLKTGSPNECVLCDDTAKGGIDGCAECTNEGSLKCTKCKPNYKQSGSNSVTCTKACEDETACGGTAGSCRAIVVGSDGNMKHYCSYCGESTKFPIDGICTDQSQGNTGCVNNVCTSCTAGYFLYMGGCYSVSKEPGSLMCTQAPGSICTTPTGQYFAVPGATDKQQSVLA

SEQ ID NO: 271 - protein, 734 aa, Giardia intestinalis
MCVPCAVANCASCELDADYCTECVQPYTLTGVGAGAYCTKTCKRIGEGACSWNSCTVMDGTMCSECASGDYVPIDGACTPYSGSARSLASPCVKDSRKGLCTSCKGNYFLYQGGCYSASEYPGTDICDERNTAVVDGQVVCGRCLVDGEVPLDGTCTKPKDGLICSKGTCSQCGEGMFLFEGACYTKGEAPGTSICGDTVRSTAGCTTCKAGFAPKNGGCVRCSDSNCGACASDPNTCTACLAGYYIQSTSCIACHPACKTCSKAGADKCTECSEGYFATFATSQSGACLSCSDTTGKDAWVGVGGCRLCTAPATAGPAVCQDCLSGYKKLSNGGTHTCHVVCPTGYYETAGSCVQCAVDNCAACTSTACTSCASGHTWDGEQCVPKTCPAQCVCRDQSISCIGCSASAVEVRPSHSGSSRCLLCSDTRANGGWTGIDGCKTCRLADSVGPVVCLECEAGRKKLTLDGVLSCPSACPADGFWTNSSECAPCASGCLRCTSDSACTACSSGYYPTQTAVSAPSHCRPCDDTASRDGFVGIAHCAVCTADPAAKTLACSACAEGYGLSGGSCAPCAAAGCARCDGGVCTSCRRGWYLAGDRCLACPSPCTACSSAASCLACADGYFQALPLGGPQECVPCNQTALQGLQVAGVYGCELCRAQAGSGTVLCLRCRDGGLPLENYCGAPPAERRLGPGAIAGISLSVLVLVGGSVGLVFGLVASKRTSQPDGLRPLTA

SEQ ID NO: 272 - protein, 372 aa, Giardia intestinalis
  misc_feature (361)..(361): Xaa can be any naturally occurring amino acid
MGHPPIKRHGVCALFMGGCYSVSAAPGSGVCSEARDGVCVRRAEEVRAEVKEPRTGCQAQESGGPETCHTCGAVIGGVSYCSQCNVDSSGTNGAPTDGTCQADNAVCSTTLDGVCTTCTGSSFMFKGGCYRTGQDPGQTMCKTAADGVCTEAVTTKEYFVPPGADNTHQSVISCADETPVELADQKQYKGIANCLTCTKPTAGKANTPKAATCDECAPGFFVASSGALCSACAENCLTCTDGTATNCKSCTANTYFLGAADGSQGKCVSCGDAAGSDGWKGVEGCVKCTKPASAGAATCTECTGDLYLKTDGSTTSCVTAGQCNNGFFPTTDSNNKKVCVKCSDNNNGGIADCAKCSLKGXARQSRSGGHVH

SEQ ID NO: 273 - protein, 1335 aa, Giardia intestinalis
MLVLLVGPLLLQVVYMEASSPTETASLSGECYNFFVLGEDTLCSDCRAFSNVPINGKCVPNDPNICIVVQGYSTKCGSCASGYILFKDGCYDLSGKYAPLICTAENRYVLGGVTYCSRCAYLDYVPVDGVCSSTSPFNTCSNNMCTSCGFSYFLFNGGCVSSSSNLGKLVCASRPENGKCPQCADGFSADSTGMCILCTVTNCASCTDGGSTCTGCKEGFFLDSTGACKLCRHHCATCSSEYDCTKCRANAQELMVDSERVCVGCGDTSSQHGGYLGVEFCSHCTLPPIPGQVQCQKCLQNYYSLTDSKTGFVTCYAVCPVGTYGDSYSKSCKNCSANCQVCESAYGCNECVPGYYVGFMSCERCRTPGCSRCTSRYTGETCEMCLPETPYMNLAGTECIAACPAGSKADTSTPVKCVCDFGYGLTGSKDSCVKCSDKYCKLCTADPTVCTECLYGNKADGATECPAPVCADNCASCTQAGHGLCDVCQEGFRLTTDSKCAKCSDQYCLACASDATVCTSCQHGFRVSSSGTCVQCGSGCKICTENSCTKCNNDAHFIGIDGINCDTQCPSHSTSVSEGSVSRCTCDDGYISDPETKLCVEEPKACPIGCVCETAPVCSGCADGFFENDPTKTDASRCRSCALATDSQGAQIMPGCKICQRVENTVLCRECLSNYKLYDADGVIHCLQNCPSGTHDTGSHCVRCSINNCAQCNADKSICEACAHDYYLWENECVSCNSLECAECGLPNTCTKCMNTKKCKACAIPHCRTCTASGKCTVCEKGFYGPTCQPCPSNCLTCSSGDSTVCLECQPGSIMSMGSCYNVCVEGTGSGKCAAGSCNSETGACMLCSVLSEFPINGVCTPNPHGNDCSAGKCTGCVSGYFIHSNGCYSLTAAPGNGICTASLSGRCTACHNGYSLQGSECVPCKVTGCAKCASDPATCDLCAIETYVVDPAGSSCVSSCAISGFGVSSSSRHCILCADQNCLDCANAANECTRCRSGYYLVAGKCMACHSTCATCSGPGEDNCLTCVRGKVHSTGTGSSTCVNECTSNSQNCLACSSIIFGTAYCSRCISGHYSINGDCHMVARSIVCLSGENGVCNSCAPGYFLYAGGCYQSERLPGSYVCAQPATDGEAGRCSKCQPGYAPLSGSCVPCENPNCQVCEYSSNICTVCADGYYGDSCTQCPKTCASCNNNLQCNKCADGYFAATDYETFDPSHCVMCSDEEGRDGYVGKKGCLSCVGPAAPGPVLCLSSNDSPVPIAPVTSTNRLPLTIGLSVTAVILLLAALAIVLWKLVSTKKLNRSKYASMSNSSAELLAGASGNNQSTMFDSVSISIN

SEQ ID NO: 274 - protein, 611 aa, Giardia intestinalis
MCPSSDRGSGRQRRHLLSERAPPHGQQAAVGSPHRGSGGRADNISSPARSLSPAVRGRPFGGSSVCGAMATMFEAIILASCILQFAWAACTPGSAGCEACGATIGGVNYCSKCTDANYAPVDGECVDVSQSTPDKQFCPQNAGGRCTQCARDSFMYQGGCYQVGQEPASSLCTSTDRAGVCVIAASGYFVPPNANSRQPSVVSCSDTAGVTLGGKTYTGVAECTQCTAEGLTDTQGGAARCVACGSKKPNKAGTGCFTCAVENCATCSADGTCETCTDGTSNTQCQAPGNKCHNSCQTCVDNVPPDVAKCKTCKADAPYLKVASSQATEGTCVTAAECTADGTHFTKDNVQINSSPIKVCLPCGATEGVAECQICKSESDTASPTCSVCEATKAPNAAGGQCLACNIANCVRCNSAETCAACGPGYVLVANECVACTTIGCKTCTNNADSQTCSACMDSTQKVSADGTKCVACGVSNCQSCSEDNVCAACTNSGEKPNTTGSECVACGIAGCSNCNAQDKCETCEAPKKPSKDQKSCTECKDKNCAFCTGEGACQECGPGYKLEGETCVSSSGNRSGLPTGAIAGISVAAVVVVGGLVGFLCWWFICRGKA

SEQ ID NO: 275 - protein, 1299 aa, Giardia intestinalis
MAGFFIVLLIALFRCKQCDSTIPNCLDCLTLDRSCCRLCQEGFLPVNGLCVEAAVSMSCTSYLGGACTTCLSEHILLHDGNQMGACIACSHTMLALGPGCKDCALVGGVPHCFACHPNYLSISTASDSGVALLRCTPLNDDHLSLEHHQRDSSRPFSRTTCTVSNCQACTSQAPDVCVQCTRGYSLINGGQSCVCSVSHCAACSSTDGLQCTQCLTNYALTSNRTCACSVRNCIDCDSYGTSPCLQCAPGYKLSEDGSTCSCGVDNCSICDSTDGAYCITCVTGYIQSYSRRSCTCAVEHCEECFPADGSQCLRCVKNYELYYDFKKCAGIMDNCLYTSPLDGLMCSVCNSGYVTASSGAICVDAKCHVLYCEQCDGTLCTQCKKGYSLMNGGLECACSASNCLICNPDDGNLCFKCIGGYDITPSGLCECTLQNCAECSQDGMSCKACVNGYRQGESGCECSLDACKTCNPTDGQLCDECYLNYDLVHGACVKKIPGCIAASLVYENVCELCDTNWELSYGQCLCKVRNCDVCHENGLKCVQCVEGFTLQNDNTECACTLANCAECDPRDGTECLACTTGHQPDAHGHCISDTCSINNCKRCASSTTCSECYDNYDLSTDKQTCTCMLANCSKCKPSNGQQCLECKTGYKLDMLMNQCLCSVHFCETCSPSDGSRCDACIAGFIKGPTSTSCNCAVDNCRVCNLSDGTKCEICDLGHTLTAGTCSPTVAYCKSYSKSRGCIECELGFSLMPLNLECLCTVQNCDTYSPTDGSECKSCVKNYLKEGNLCHCQVARCLRCDSTDGELCSTCIKNYVLSEDKASCECSVPNCMLCISRDGGQCYICEDGYRLTEDASCEEVPCSVMDCLSCPPDNPDICLVCRKGFWPADDRTRCACSDPACSECDFEDGALCLDCNANYTEIGSKCFCSRPYCVKCDIDDGSICEQCEEGFVLTSANACILRVCFAGQDNCELCGTGAHANKCLMCINGYVPINGVCVQDSKQDICIQSLGVCTSCVSTYFFWQNGCYPCSMIPNCIECYMTSAYGPLCKMCEAFYTLRGGKCQLDPYCSRGCECDDNLQCIGCITGYVMMNDICTLCEDLFYMCAECTSTFCIRCFDGYSVVNDDCVLGTCKEGTHGCLVCANDYTCMQCRSGMYLYRGACRECNFAGSNCAECIFNGEYQCLKCLENHVLVVSNGIFYCAKCPDIAHCLKCAYNSTRPSQFQCTLCDDPWLIDTVTGTCYMEDTSNMSTTVAVSCSVIGVGIVAVVVIAVIIKHRHHVCARMTHQNNLLDSAIDKSFH

SEQ ID NO: 276 - protein, 2165 aa, Giardia intestinalis
MLTGLVLSLALVGLRAHAQAASTITTAEEFNAIRNTPSGSYILGADIILDSSYVPIPSFTGSLDGANHKLTISGQTGSFGVFGDQFSGSVHSLKLSFTATISGSLSSPVGTLIGVSTGSATVDSVFVEGTMTLSNTGDASITVGGVIGSATETTTLRNITSEIAIACTGGSHSIGGIVGSSLVGCTECFYGGTISAGGAKASVVGGIFGTAGGVSLTNSAMYKGSLSTTSVATDQASALGALVGNITATGFTLQECYAEFTSISLTSSSAAYLGGLIGSFSLATSKDTVTISNSYVNGSTQTLSTTGGLSTSAGFLGYAASGKVTVTSSYVNLSRFAVSGSAQVNATLSVGTANQITGLTMENCYLSAQTVDLSGGTTKSSFSPIANVINVQSKGINVLELESRIGSLTLSSFTGLVSLAVSRFVTTTGGKLQDCFTSLDSCSLGSTPAGNTALFYAYVAGNAIATNIIANVSCAAITNADSGKSNASITYNYFNSGTAGPITSVAGKYIGLTDSDMRLPGSYIGIDTTVWNIDGSHYPHLKRTPHYRDGSYIIDDRAKWTADVWEIGQSMRLKRTNPPASCDSTNLQCSTTQYVDVSSCQCVEGCPGLVNGQCIGPNKAKCNPGFKLDQTNNCSIYSCITAIGGCPLADGSSGATCNTALDVCACADPNSYYDHTSKTCISGCTALVGGICTGSNEATCYPGWVADGNSLCAKYDCSTLTESDSNVCSGPSVATCDSTLKVCVCRDKTQYYDPSPANPRCITGCSAGVQYGVCSGSGQAVCIAHVTSVSGATSQDVLCTEYSCDTVSCGAQAECNSELKVCLCPLTSQYYDIEAHNCVAGCSSLAEGICVGQNRAKCRPGYSSQNGVLCGVYSCANDQSSRKCGGLGTCENGSCVCNQQAVLFRGSCKEGLCRNGNVVNGVCQCLAGWSSPTTDEQIEASGYCSIYTCPSTGTVIDLATPGSLMAIKACPSHSFRLTNDILARDYEWEGFDFSGSLDGNNHMISEINLRVSSSSSGCSASFFKQLTGQVRNVQLVFASSPVLDTVGQDSVCKFGLLSISTAASTVLENVIVSGSLSLQVPATVAAEIGGVFHTCPSSPTDVINSVTVTCAGANCTMGGYCHTVSAALTAGTSTATLKCQAVDGAVCIAGGFAYTVHAPISNIISAAQISLVPVSGEVTQAARVSVGGIAAVLAEGASASDCQFSGYITREQGDLNPAAIVHSGGAFYMVNGTSTAKVTIEGCTVTSDELSGIGMAGFVGTLINSTVRNCSAIATKIDGLRSASGFAQYVNDSVITNSFVKANVSITTEGRRMVGGFCGLASNAQISNTYAEIGNFSSPNTLTSSSIGGFVGRVENSVIRDSFVRANLLEATSLTSTSSQWTFGGFAGFIDQVGAGPMEIQRCFGDISNLSMSTVGSVYLGAFGGQIRKKSSTRATSKTISNVWINANVECTFSVPEDTSKKLANGVGMFAGKMYNGVALSLATINGSLVCRGANPPSMTTSQYYIGLFNGAKTSDTATSAEFVVINVTVSGVNGIGLKGAPDDKLVCSTCFANSDLLASTTRLSASTDPNLKTSEELRKMSTYSGFDIGTTGSKWTKSPGEFPFLNSLPALVPVDNKATYIYPACTQDCWDYTSFWVLSPSGPTTDDNKRHCADIANCMIYANNCMCSQCNLRYYFDGSACVACSSGCQTCRSADFCEICENGQVSNGVGVCIAPSCDFLYCGECSADNTACTTCSMRAFKAANGQCEKCGEGCKQCTGATACTSCGDGNYKPSPENGVCTCKDGFYSSESKCLQCNEACQTCTGGTAGDCTACSEGWTRDEATGTCTPQCAEVAGCLLCPNPPTCGTCRSDYILVNGQCVSSNTCMVANCLTCVTGNMNACASCKDGFYGSSCAACPERCSACDSSVRCTACKSGYALSSGGQCVTCSVSNCNQCSSDNTCSSCTDGYYLNVGQCSPCNKPCRTCVANADKCTSCQSGYELSANTCISTTACDVEHCRSCISPGVCGKCDTGYYVSSSRCSQCNSMCRECYGPNTCTECAANNAIPDENGICVSIVCNVSNCIRCDLDTLSVCTMCDSGYTLSSDNTCSLNTPPANKNSGMIAGVSVFVVIVVIAVVVVVVILFKKGVIGGKRSRRAPGMSSKYSGSMLSYNSLNESMNTPLL

SEQ ID NO: 277 - protein, 413 aa, Giardia intestinalis
MRVLILLLLHGIFSECTQDSDCGGATGVCNVTIGGKKYCSKCDGARVPVNGDCRLLSLSRGICIVPTGSNPTPGSCSGCIRDFLFYRGGCYRTASLINAICKEKHIVEEGMYCGACAIEGDVPIDGVCVPAGSAAGNTCSKGVCTTCTGGYFLHYGSCYKFDSSPGSIVCPNQSDTTGSVCGSCGSKFVKNPSASSSATSCLACYGLDGTLFCERCRMNVLTGADAKPTLCTQCQIGYVPVDGRCLSNYSALAALAGCSDPRGNGLCDACSSGFMLFYGSCYSVDGPLAQAICAAEDQIYVNGRVLCKRCAQPDHYPLNGVCIGQSSDGTDGHTCSGGSCTACSTKQTADGTPEFFLFYSGCYDITHPIGKSICSAVADGACTACASSDSSSVITITADGQSSKCLACWDDTV

SEQ ID NO: 278 - protein, 164 aa, Giardia intestinalis
MAAAVCSACDKTKKPNKDGSGCTLCAVGGCKSCAIDGMCEVCAEDNKKPNMAGSTCYVCPAQGCSHCSADNKCEACTNKDQRPSLDGTQCIVCDIERCMRCSAEGVCGECEEGYVPRDGMCVSSGTNRSGLSTGAIAGISVAVVVVVGGLVGFLCWWFICRGKA

SEQ ID NO: 279 - protein, 343 aa, Giardia intestinalis
MLIGLLLVCVVVRIHCTSELDKANHKTCTRVASVVDECPIKDCKACSEDKGTCTECEPGKHLTPTKKACLADCPAGTYLLEQACTPCDPSCAECGGAGASKCTACPAGKMLRYADEGKLNEGGQCVEGPECETCGLTIGGTKYCSKCKGSSVPLNGVCTSNAARAQFCTTAADGACTVCAAGYFIQGGGCYETTRQPGEQICALTDNKGKCQTCANGLGPDGAGTCPSCDPTCKTCSAANQENKCTTCATGYYKTALEGVCTSCESDSNGVTGVRNCLNCAPPSAGSGSVLCYLMKGGDSTGGSTNKSGLSTGAIAGISVAVVIVVGGLVGFLCWWFICRGKA

SEQ ID NO: 280 - protein, 719 aa, Giardia intestinalis
MFDKLILTIVVLQVVYAECQAQASGTGKCFTDRCDVTIDGETYCSQCAEKATEAPIDGVCKAVASDPSGCQSDNAGGCTQCGAGYFLHKGGCYQIGKAPGNLVCADSIPGPSARTAGICATCKDGYYKNPGDSPTADSCAACQDSNCATCEDATATNKCTKCMDGYFIGADANKGPCVSCGNAAGSGGWKGVAGCAKCKKPATSDTPAECIECSTEYLKTESSTQTSCVAEAACKEGNTYFPTTNGDKKLCVTCGDTATGGIEYCTKCSLVTDQGKAALITCLACGSSKKLSPGKTSCMDACPAHSNDKATPNICECDDGYTPDEAGTQCTGTPSPPPPSDCPVENCQKCSADKKTCEECKESAYLTPTKMCISDCAIIPGYYGANDNPKTCKPCEVTNCAACNMDGTCKTCKDGLYLSASSCQACNSSCKACSGPGEGDCIECKPKTILSYVDAEKGRCIPECTDTSTGPGSCKTCGLSVDGTKYCSACNVATEYPQDGVCKENTQRAGERCTTSHILSGVCTQCENGYFLMNGGCYKTDTYPGKTVCAQIEVTLGTCDNSAPGYYLSGGSLTVCSEGCAVCTTPDTCTRCMEGFVKLGSENTCTKCDASCKTCDAAVATCVECNTGYYKAAPGNGICISCENSSNGIIGIDNCISCKASSIPGPVLCYLMKDDGTGGSTNRDGLSTGAIAGIAVAVVIVVGGLVGFLCWWFVCRGKA

SEQ ID NO: 281 - protein, 410 aa, Giardia intestinalis
MLIAVLLICTTALAKSVPKTACNPAIDGCSTCETSPEGEQTCTGCTTDGQKVQPNGKGCIAKCPDNATEEGGICKCLATHQPSDNGLTCVPKTACNTPNCKACDNPKTDREVCTECNDGNYLTPTNQCVPDCTAIGGYYGDADKKCKKCSSECAECVGPASNQCSACPTGKALTYTNGEDPTQGGACGDACAADKNGCKACGAKIGGTDYCSQCSVDNQAPLNGNCATSSARVAFCTTMGAGVCTKCAANYFLQDGGCYEATRQPGKQICTLATNDGKCQTCANSLQPNNGVCPLCHSTCKTCSTADTANACTTCAAGYYMLGSAAGACTSCEADNGSVKGVKGCLSCAPPSTGSGSVLCYLTKDDGTGGSTNRSGLTTGAIAGIAVAVIIVVGGLVGFLCWWFLCRGKA

SEQ ID NO: 282 - protein, 565 aa, Giardia intestinalis
MGGCYSAASAPGNLMCKTAEGGKCTAPNENNKYFLVPGAASNQQSVMACENPLGTAVGEKAYVGVEGCDTCTAPAPLTEAGMRPARCTACNLGSGKPNLAGSGCFKCNIPTCSHCSANGVCEACTSEEQRPNTDGTKCISCNIDGCTRCSAENKCDQCGDGYRLEGETCVQIQPSACKTLGNAGCATCDPNGGDEICLTCTKESDFLQLNKKSCKASCDGDGEIADPTSTPKVCKCDAEKGYQLQDDACVQTQPSACQTENCQECTNRGKENEVCTECISTHYLTPTSQCVKDCTIISGYYGDADKKCKRCHDACAECVGAANNQCSACPAGRMLQYTNTNTPAYGGTCVGQCSVSATGEGCEVCGARIGGTDYCSKCKGSQVPINGVCAANPSARATACTSNGQGACTSCTGDYFLRDGGCYQTDRLPGKSICTQAANGQCNKCANDLVVSGGNCGECHPTCATCSAAGAADKCKTCVTGYYKTSDNEGSCRKCSEGLVGCRQCIASANAFVCLEMSDNTSENVNKSGLSTGAIAGITAAAVIVVGGLVSFLCWWFIYRGKART

SEQ ID NO: 283 - protein, 836 aa, Giardia intestinalis
MLLKITLTCAIALAACQEGAESTNCKEGSCTVKIGGDSPENTYCSQCATEGEAPINGACAVDNGFCTANNAGVCTECATTVNIFMYKGGCYTTSEAPGQTICTAADSGKCTSAGTGYFIIPAEDTDASHQSVVSCGDAEGAAVNNDKTYKGVKDCVKCNAPGPIQSPSGTAAATCTECGNNKIVKTDTSGTSCVEESACSGGFFVSGQKEAQSKDKKCIACSAETYGVADCNECSPRTDDPTKAGCTACSGSKKPNAAGDHCYTCEGSGDTKDCATCSSDNVCETCIPGKILRIDAAKTCIAEAECTGGFFVSTDGSGGKTCIKCTDQTNGVTECAVCEARTDDRAKAKCLACSGENKKPNVTGDQCYDCSVPNCEKCKAPDQCEACSTGEPLETGQCSEVRTECHESCSTCLEGAMNNEPEKCTGCKDLKYLKIEDSGKGSGTCVPKGSCGADHFEVETDRKCYPCNAVDNGGVDGCAACTPRASTRDARAVLIACSACTDTRRPNTDGTRCIPCSVDGCGNCNEENVCAKCASGRRLTPTRECVDKCGKLEGYFDGDDGTCKACSSVCKACSGEDPHQCTSCPARKVLKYTVEGALEHGGTCVDECTINTNGCAECGATIGEARYCSKCSDPTQAPLNGNCTASARAADQCEKVVDGACAKCKEGSFLFEGGCYETARQPGMQICKDAAGSDGKCKTCANTLPPSADTGACPSCPAGCATCTAAGQTHACQTCLAGYYLDSDRHLCTKCTESSGGIHGVADCASCDPPVGSSGPVTCYVKRDGTGGGDSGSGGGSANKSGLSTGAIAGISVAAIVVVGGLVGFLCWWFICRGRA

SEQ ID NO: 284 - protein, 387 aa, Giardia intestinalis
MIGSKQICTQCNQGNVPIDGVCKQKDNEAVTAADCKKSEGTGLAESDKVCGKCGAGYFLYKGGCYKIGGEVGSLICADTSSPGVRATAGVCEDCKSGYFKNPEAAANADSCISCGDQAGFTITGGSGNTYKGVQNCATCQAPAGPGAVRATHTAVCESCQEGFLVDNNGAACTQCSDNTNCAKCDAGADKCTKCKATATNKYFKDSGDGTGTCVNEGGCNDNTHFTDDAEDPTHGKMCRKCSEGIADCKTCAPPSPAALTTTSTIVCTECTTATNKPNVAGTGCFTCSIDGCDNCSENGICEKCGPSKKVSPGKSSCIEKCPENSTENSNACVCNSGYGPDSAGTGCVTVSTNLSTGAIAGISVAAIVVVGGLVGFLCWWFICRGKA

SEQ ID NO: 285 - protein, 810 aa, Giardia intestinalis
MLATLLLLFLVSSYGASTDTYHNNFGVACDNAQENCMQNRCVVIESTSVCTQCIPGYVPISGTCTEYPGSASSICIPDSTTSPTRCVECKDSASEASMFLFYGGCYDMIDESIGSSVCSKASSGKCTECNVGVGGRYVFTNPDGSTAEGCILCSDRVGFGGYRGVAGCLECIQPVDQRLGTPLCFECDSTTLAPIDYQCQDKGHHICSDGRCTSCYKTHLFYNGGCYGRHTTTGLAICAGPNQYELDNTTICTECANASYAPKNGACTLVKKDSTTGGLFLDCAKDPARGLCTACSSSTPSFLFYGGCYDTSSYVGSILCSRIGSNACEEWNGQYPFIFPEDTAKRDHYLCGDAANGGVASCATCSYASSAVICTSCSAGYLGVDGKSCNESCSGNTQGACIEILGGSESTILLCQCICKLGFYNNSGICMPCTDSCAACKDGTPNGCQQCSPGKVLESSVITSGNAKCIDECTTHGSCVECGLTIDGSKYCTRCKDPSMYPLNGVCTTDAQRTSYCTTKANGICSACSEAAFLMNGGCYTTVHYPGDIICISQADGKCTATREGYGISADGKLQPCAPECLECTAPGLGRCTKCPPGRLLRRASAAATGSCIEPGACADGYYADGDACLPCVVPGCRACGRTSFCTECAGELFVGLDGRACLRECSGDRVVGEVSGGTRRCWCERGFVLALDRSGCVPTAECPPGVPWCASCDESGRCLSCAAPGHNIQVDQRTCAEGCGDRAAPDQGVCVCETGTVLDKDACVPINALTGRKMMVVTTSAAAAVLVIGVLAGFLCWWFICRGKRRCYR

SEQ ID NO: 286 - protein, 408 aa, Giardia intestinalis
MLIAVLLIYTTALAKSVPKTACDPAIPGCSTCETPPGGEQTCTGCTDGGQKVRPDRKGCIDECPADSNEREGICTCAETHQPSGDGLTCVLKAACNTPNCKACDNPKTDKEVCTECNGGNYLTPTNQCVPDCTAIGGYHGDADKKCKKCNSECAECVGPASNQCSACPTGKALTYTNGEDPTQGGACGDACTVDKNGCKACGAKIGGTDYCSQCSVGTQAPLNGVCTANARAQFCAQVTEGSCTSCSGGYFLKNGGCYQADRQPGKQICTLADSKGGCETCANGLPPSSSDVCPSCHPTCKTCSVASNPDKCTSCAAGYYMVGLNDGTCTSCERDSGNVKGVSGCLSCDPPSNSQGTVLCYLTKDDSTGGSTNRSGLSMGAIAGISVAVVIVVGGLVGFLCWWFLCRG

SEQ ID NO: 287 - protein, 255 aa, Giardia intestinalis
MLLIVFCFVLGTLAVQHAESHHSEYLSSNSQSDGDVGTRGNVYAAGNCEGGMEEQVGAETVCKQCTAGFVPINGVCAAQNTPSVGTAGCKLANGDSPGLDSTVCEQCGTDATYFLYKGGCYDASTGVGKSLCKRASSGACAEAGEGYFAAPSAKATEQSVVSCSDTTGVTLAGDKQYVGVANCATCSAPTEDERVAKCKTCNDKFSLEDNQCVPSSTNKSGLTTGAIAGISVAVVIVVGGLVGFLCWWFLCRGKA

SEQ ID NO: 288 - protein, 654 aa, Giardia intestinalis
MFEKVLFASLILQVTQAVAKTCTEASDSSQTGQCKKGKCISIGEDSVCTDCAKPGEVPINGECKDKTDGLITTAGCEKADGALDEQSTTCEKCTKTGYFLHKGGCYAQATPPGQTICKSAGSSAGLCETCNDVNGFFKNAGASDNTHQSCIACNEAEAVDGFRGIPNCKVCTSPVSPGYAICTGCEGDYYLLAGSPIICITEVQCKADSDHFPTTVEGIKKCIACGDAEAGGIADCETCALKEARMAEAPVVTCNKCAGEKVPDGDGSACVNAPEPSPSDCLIENCQKCSADNQTCEECKDMNYLTPTRMCVSDCATIPGYYGADGKPRTCKPCEITDCATCNPQGQCETCKDGYYKNGAACTKCDDSCKTCANGEPNGCTSCGSSKALKYEGAGNTGTCGEGCKPVSGGTDGTCKTCGLSIDGTSYCSVCNTDKEYPESGVCVKRSARTTSCQAEPSGGVCGTCAKGFFRIDGGCYETAKFPGKSVCADANADADTCKTPVPGYKIEAGKLVTCSEGCDTCSDANTCTKCKDGYVLITSKCTPCSAGCATCTGTAAGCSTCSTGYYKSGPKCIACDKDDSAIKGISNCLNCAPPSTGSGSVLCYLTKDDSTGGSTNRSGLSTGAIAGIAVAAVVVVGGLVGFLCWWFLCRGKA

SEQ ID NO: 289 - protein, 740 aa, Giardia intestinalis
MLCLLAFGLTGSFVIDPYQNAFEKECTTAAQKNACATKKCITVSGTELCRECISGKVPIDGICKDTTDPDVSLYGCEHTTGYCTLCKSPAFLFYGGCYAISKTPGSLICSNIESGKCTKCRQESRFLFTNPNNDAAERCILCYDNVGFSSYKGVDGCMYCLPPLAEETSAECNWCQNKKYGPIDGVCTDPGKHSCADGACSNCYMTHIQHNGGCYEKTGAVAQKICVTQNQFQVTNITACKKCVITGEAPMDGRCINVKFNSKCNPYPNTTGSCTDCKRDGVNDDTFLFNNGCYNISDYIGSQLCSKVGENAECELWNIGSYAVFRPPNDRNAYTCSDTSARGIPGCSRCHYDVEKKRPICYNCEHETLAFDRMSCTTETGCTGENIQRKCPGNSERGCRCECAEKSYKNGNKCVACDSSCLKCSGTENRSCTLCPPGKALKYAGSSMAGTCEDGCKQDDTCETCGLTVNQTAYCSKCKNSAQYPLDGVCTSTGEARTSACLQQSNGACQKCSSDYFLMGGGCYQINKYPGRFVCGWADDGKCVETMNGYSINDQGQLVDCDSNCMTCVEGKKEQCLSCRTNKYLKKEGTNSYGTCVSRNACKDGYYANHDTMECLPCNINDCVSCHLIDKSILCSRCHGDNLVSLDKLSCTTVIPENAVEFWGGYTCNDDSVLSGNTCLKKSSQSNKGSGLSNNVTIGIGIGAVVIMGTLIGILTWWVVSQKKKGANSERSRSLVISKS

SEQ ID NO: 290 - protein, 514 aa, Giardia intestinalis
MFAKLIFISLILQLTEATRPAGRTRSEGECTSLGAAGCATCSTGDSGETCLTCTDPEKFIAANKKSCEDACNTSGGEVVDSAAVGPDGSPIKACKCDTEKGYQLQGDACVQAPPDGACSTLKPAGCATCSTGDSGETCLTCTDPEKFIAANKKSCEDACNTSGGEVVDSAAVGPDGSPIKACKCDTEKGYQLQGDACVKTQPSACKTENCQECTNKGAADEVCTKCNPTHYLTPTNQCVSDCTTIKGYYGDTDGKCKACNPECAECVGAANNQCSACPAGKSLAYSNSMYPNNGGTCGDACTVDKNGCKVCGAKIGGTDYCSQCSDATQAPLNGNCTANTRAAFCTKMGTGACTQCADGYFLKDGGCYQTDRQPGKQVCSSAQGGNGKCRTCANGLAASDGNCGECHPTCATCSAAGAAEKCRTCATGYYKENADSSADGTCKRCSEKIPGCKQCTSSSAGSVVCLESEAGTGGSTNKSGLSTGAIAGIAVAVIIVVGGLVGFLCWWFLCRGKA

SEQ ID NO: 291 - protein, 1299 aa, Giardia intestinalis
MMSFFVALLPALFRCGRCGSTVPRCLDCLDLDNNYCCRCQGDFLPVNGLCLGGDASMPCASYLDGTCTGCLPGYLLVHDGGQMGACIACSHVVLKLGPGCKDCTLVNGVPHCLACHSNYFGISVPSHSGATLLQCTTLSKRKMSLWSQRKDLFVLPGQAACTVQNCRACTSRAPNICVQCTRGYSLTDEGRTCVCGVPHCTTCSPTDGQQCTQCDTNYALTLHRACVCSVRYCVQCSSQGPARCQKCITGYRLSEDGSTCNCGVDNCAFCSPTDGAHCVTCVAGYVQSYSQRSCTCAVENCAECFPADGSQCVRCVANYAISHDFKVCESSPENCLYPSPFNGSICSICNSGYVTAFSGEVCLSVKCQVLYCEECDGVLCAQCRKGYSLVNDGLGCACNALNCLICNPDDGNLCLKCLGGYDITPDGLCECTIRNCATCSQDGRSCKACVNGYRQGESGCECLIGTCKTCNPQDGQLCDECHLNYDLVHGTCVGKLPGCLFASFIYEGVCELCNENWELFHGRCFCKIRNCNKCYEDGKVCIQCAKGFTLQTGNTECACTLTNCAECDPKDGTKCLACNTGYTLDSSGQCTTGTCSIDNCKTCDQSGVCTECNDNYELSTDGRTCTCMLSNCSRCRPSNGQQCLECVTGYKLDSSMNQCICDVHLCETCNSSNGARCDTCIAGFIKGPTGTTCSCAVDNCRVCSLSDGTKCEICNLGYVLAGNACQPNIANCEQYSLSRGCVECVSGYSLMPSNLECLCTVQNCETCSPTNGSECTSCVKNYMLQENLCLCRVQDCLQCDNTDGYLCSVCTHNYVLSEDRMTCACGIENCMECAIKDGKKCFMCEEGYRLTETDACEEIPCNVENCLSCPPDNPNYCIVCLRGYWPVNNGSMCACSDPACIECDIEDGAVCFECNANYKMFNNKCICSLPYCIKCDTNDGSQCEQCERGFVLTSAKACILRVCFTNQDNCKVCGTGAHANKCLTCIDGYVPIDGVCVQDSKQDICNQRSGMCTSCVPTYFLWQNGCYPCDMIPNCIECYMSSTYGPLCMICEPFYTLRGGKCQLNPYCSRGCECNDSLQCIDCIAGYTMVNNVCALCEDLFYMCAECSKTFCTRCFDGYSISNHDCVLGKCEENAHGCLVCANDYTCARCRDGMYLYRGACRECNFAGSNCADCTFDKEYKCLRCLGGYTQVVSNGVPYCVKCPDIDHCLECTYNGTRSLQFQCTVCADPWLVDTATGTCFTRKTSNASTITTLSCSVIGAAIAITVTIALIVKCQHYRHARTARQVGSLVMEVDEPGH

SEQ ID NO: 292 - protein, 579 aa, Giardia intestinalis
MLLVAFCFVLSIFAADCKSDGSQYSVCTNGKCEMISETEICTECKVGGNVPINGVCTSKDNVADKCKKASDEVLTEDDKICGKCEGSTFMYKGGCYDKEGELGRAICKTSGATPGVCDECQEGYFKNADNLATTDSCSPCKDAHCAECKDASTTEKCTRCMEGYFIAKNTAEGPCISCSADSPTNSYQGVPGCAKCEKPVSPGPVKCTKCVNDYLKIDAEATTCVKESECTKGFFATIVDGIKKCLKCNDVYSGITGCSECLLLPSASRANKVLIKCIACETDKLSPLGDACLVSCPAGTYAVSGDSGSVCTPCHKSCANCKTNDAETSCTACYPGYSLLYGSDGSADTGKCIKECTGEFGANCADGQCTADVGGAKYCAQCKDGYAPIDGVCTAVTAGRDASMCTAAGGKCTACKGSYALISGGCYGTQKLPGSAVCTAARDGKCSACGNGETQKDGVCPACPTGCSKCAAGSSPQQCSECLPGYYKSKTKCVACNKDDEADIKGVPNCVSCKEPAGSGTVTCYLTQEKTDDSTGGSTNQSNGGLTTGAIAGIAVAVVIVVGGLVGFLCWWFLCRGKA

SEQ ID NO: 293 - protein, 421 aa, Giardia intestinalis
MFAKLIFISLILQLTEATRPAGRTRSSGACTSLGDAGCATCNPNDGDELCLTCTNEEEFIQLDKKGCTAACAGEGVIGDSVANPKVCKCNEGSGYKPQGGKCVKDSEGECKAENCQECTNKGTANEVCTKCISTHYLTPTNQCVPDCTVIEGYYNDRAANRCEKCNSNCKTCLAADGDKCTSCPAGRALTYEAGDPTRGGTCGDACKVSADGAGCETCGAQIGGTAYCSKCKNTQQAPLDGNCAANARTRFCNTVSNGACTQCADGYFLKDGGCYQTDRQPGKQVCSSAQGGNGKCRTCANGLAASDGNCGECHPTCATCSAAGAAEKCRTCATGYYKENADSSADGTCKRCSEKIPGCKQCTLSSAGSVICLESEAGTGGSTNKSGLSTGAIAGIAVAVVIVVGGLVGFLCWWFLCRGKA

SEQ ID NO: 294 - protein, 674 aa, Giardia intestinalis
MLLIALLFVSNTFAADCQPDGDHAATCQTGKCEAVGSSEICTQCRAGGAPIDGFCRPVGSPQVIAAGCTKGDGSALEGTATTCGKCGSGYFLFMGGCYRTGSQPGSEICTAAEGGKCTVCNTANGLFKNPAAAPDAGRECLFCWDTAEINGITGVVGCSECSHIGTSGPVTCSACNERYFLDGARHTCTQCINNCETCTGAGATNCKTCKAGFYLKDGNTCVAEGSCTDTAYPDLESGICKACTTIHEQCTACSFDKANGRPKCTACGGSQILKTELDGTVTCVVEGQCAAEKTHFVIDESGKKCVPCSDVTTGSTDEKQGVANCRTCTSSPSQKPICETCLDGYYGTTSCTECDANCATCNSAGAAQCQTCKPGYFLKGGQAPAECVACDSTTDSGISGCAICTFDTSLTCNSCKPDYALIGSGCQKSCEDDTGCGGASGACDATIIDGQGNAKHYCSYCGKTNDVPIDGRCVANTQNQGNTGCTDHVCTQCTTGYFLYMGGCYSVSTAPSSHMCKTADGGVCTEAASDKYFAVPGAAKTGQSVLACGNPLGTAVDDKTYVGVEGCSQCTAPAQLDAPGMASATCTACGEGRKPSKSGTGCAACSDANCRHCRVDGVCEECSSGFSLEGGKCVSTGGPNLSTEAIAGISVAAIVVVGGLVGFLCWWFLCRGKA

SEQ ID NO: 295 - protein, 1062 aa, Giardia intestinalis
MCTGSMHLYKGGCYSCGNFYPGNLICKECDKGVCTSCTSNFFKNPAASQTVDSCIRCNDTTGVSGYVGVTDCLRCSLPSNSKVAKCRACKLSTHKPNLEGNACYRCRTPDCYRCKADNVCEVCGNFKYLQGTTRPYCVSSCGAGFYSVSVPSLQCKKCSATCRACEGPTELDCTACRESENYFLTATNGAGKCISCGDERGYAGWMGIANCKTCYPPNGPGVATCNTCERGYSLVDGKCKADCDDSSGQCAANSCHVTIGDKSFCSLCNAGYAPVDGICKNAQSDLPSGCVADNGQCNKCGAGYFLYYGGCYSGSTETHKTICLEVGTEPDRVGLCNKCADGFQNKDGVCILCWDSDCKTCSKDAAKCEVCRDGFYDPEFCRHCYKSCETCIGEGSKQCLTCPSNQYLRPIYDNAGMCVESTECGYGMYGDSSSHKCVPCSAGCSTCEGAGDDKCTSCPIRTHFLDGSSNGAGRCIECGNTTNSKGIDGCRECTMEGDSVKCLACKAGYTLVDGKCQSNCQDPNCAADSCVVGISEKLYCRLCKTDGHAPIDGVCTEVSGAHPSGCVTGVAPDSARSCLQCGAGYFLYMGGCYQENKEPGKSVCTWVGVLGPINKNNYGLGLCNACAPGYENQNGICHPCATVNCEQCQTEDQKEVCTHCMVGYVMDQTGRCSTQTTGSCAVPGCAVCANDGRCQSCGPRSFLTGAGTCVNNCRDIPGHYALDATGEGPARCALCEVRNCKECGASDSCAVCADGYFSDNGACAPCDSKCATCMARGPDGCTSCPPGYAITSESRVGRCERPCTPSAEGCKACDASIDGASYCSVCSVQTAFPLNGQCVGPSARAEPACASVVDGVCKKCADGYFLLSGGCYQVETYPGRAVCRAEEQGVCTRGAHGKIVSASGVLRECSVANCAECTADACVTCRVGYVHVNGQCQRCAPGCVACTAPDNPQMCTLCDTGYYQSTTGSVFTCTACSAGNNGMTGVSKCTYCVPPEGKAGSVLCYSFGTSPNITPTPEPGPAPDPSSARKTALIAGASVAGVLLITGLVGFLLWWFLCRSIR

SEQ ID NO: 296 - protein, 714 aa, Giardia intestinalis
MFEKVLFASLILQVAQACTAEPSGGDGTCHTCEAPIGQTNYCSKCNGANHAPVNGQCTDVSQDKTICAENGEGKCTRCAGTAFKYNDGCYQASEGKPGFNLCVLAASGVCTEGAPGYFVPTGAVNTEQSVIACSDTTGVAIAANGGNKYKGVADCAECSAPDAAPGAGADKIATCTKCGAGKYLKDNGCIDKAQCDPDSTNRFVAVDDPGNGNRCVSCSDNSNGGVTNCDTCAYDEQSKKIKCTKCAGSNYLKATGEGTSCVQKDHCKDGFFPKDDSGAGNKCLPCNDGTDGIPDCTACALVNGRSGAVLITCTACAAGYKPSADKTTCEAVTNCKTPGCQTCNNEGKENEVCTECASGAYLTPTSQCIDSCDKLGNYYGATEGAKQTCKECAVPNCKTCNNQGQCQICKDGSYKNGDTCSPCHESCKTCSAGTANDCTACPTGRALKYGGDGAKGTCGDGCTTGQGSGACKTCGLTIDGASYCSECAVDTEYPQNGVCAPKANRATPTCSDSPIQNGVCGTCANNYFKMNGGCYEIAKYPGKAVCTATQAGGTCKTAADGYKLDSGTLTVCSEGCKECASGTECTTCMDRYVKSTKICTKCDSSCETCNGAATTCKVCAIGYYKTASEEGVCTSCESDSNGVTGVKGCLNCVPPSGNTGPVLCYLMKDDGTGGSTNRGGLSTGAIAGIAVAVVVVVGGLVGFLCWWFLCRGKA

SEQ ID NO: 297 - protein, 684 aa, Giardia intestinalis
MLSIAFCFTMTTLAAPCDPEGNHMAACAHEQCEAIGIYEVCTQCRAGGVPIDGFCRPIGSPQVITAGCTKKDGADLDSTATTCGKCGSEYFLFMGGCYKTGQEPGSDVCTTATEGRCTICNTDSKYVFQNGASQATPGGECVLCSDAKGKDGFLGVENCAQCTKTGAEAGTATCEACQTGYNKNSNTCEKCDDTCLTCTGTGATHCSSCRPGTYLKSDNSCSGNCEGGQYADPESQTCKACSAITDCTACKYNATVSKPQCTACGSGKKVKTAIDGATTCVTVASECVDSDHFKDDGDTMCVLCSDVSGSDPNKGIAQCKTCSKDGANKPECKACLDGYVLRGAGDTATCESCENNCAVCTTAGDMKTCTKCMPGYFLQLDGELKECIPCSEISKGGREGCSVCSNTGGFKCTNCKANYQKEGEADNCTCRKTCEDETACGGTAGACDAIVIDAEGKALNYCSYCGGADDVPINGLCVNNGNKAGNTCANGVCTQCAAGYFLYMGGCYDVTKTPGNLMCKAAGQEGICTEAASDKYFVVPGVTSNTEQSVLACANPLGTLAVGNAYVGVEDCSQCAAPDARSDGGMAVATCTACGEGRKPNKSGTGCAACSIENCRHCRVDDVCEECSSGFSLEGGKCISTGTSGGNRSGLSTGAIAGIAVAVVVVVGGLVGFLCWWFICRGKA

SEQ ID NO: 298 - protein, 652 aa, Giardia intestinalis
MFNRVIVVSFILQFVWTASEAETCTEAGEGTTAKCLTGKCDVWINSKKYCSQCAKTDEYLINGECNANVGASGCQIKARAADGTCTQCGDGYFLYKNGCYAIGGTPGNEICADTLPSDPSGTAGKCQNCAPGYFNNPAADAAGTPPCIACNDTSGFTDASDGNKVYKGIKDCAVCSPPNVLAAAREDKVAVCESCIEGNYVENNGATCTACTDANCAKCRTAGQKQCIECKATGNEIYLKKEDGTEMGVCVTDVACKTQDTHFPTTDANQKKICTPCNDKAIGGVDGCQTCTLKDNPESSILITCSTCTVDTNKPNIDGTKCVPCDIQDCIKCNEENMCEECTGGKSIGSLRNECMEGCPAGTRDVDGMCTSCHTSCAECDGDSETSCTACYPGAVLDRMVTNGHTGACIPECTGKYAENCEANQCTAVVGGSKYCSRCKSGYVPVDGLCVLVETATRASPTGCTPSENNDGTCKACTATYFLQSGGCYQSAAYPGSKLCGNAQDGKCTNCANEQKPEDSTGSCPACASGCKTCDAASKETCKTCLPGYYLAGAKCVKCDTDDPNGGSHIVGVPNCISCAAPASPSPGASTPVTCYVKTDGTSGGGGSSGGGSTNKSGLSTGAIAGISVAVVVVVGGLVGFLCWWFLCRGKA

SEQ ID NO: 299 - protein, 678 aa, Giardia intestinalis
MLLIALLFVSSTLAADCQPDGDHAATCQTGRCETVGSSEICTQCRAGGAPIDGFCRPVGSPQVITAGCTKGDGTALEQTAATCEKCGSEYFLFMGGCYRTESQPGSEICTAAEGGKCTACKTDSGLFKNPAVTVSLGSECVLCSDTTERDGITGVKDCAQCTHTSTSGAATCTTCKAGAFSKGTTCEKCSNSCLTCETEATRCTSCPEGKYLKATTCVDISGCDGATYADPESQTCKECNTITDCTACKYNATVSKPQCTACGSGKKVKTAIDGATTCVTVASECVDDYHFKADNDAECTLCSNTTAGSTANDKGIANCNKCAKANSGQTPKCSECENGFFFDRSSCTKKCADNCATCSAETAEDKCLTCKAGFFLVEATKPAGRCIPCDSTQNGGISGCAECTGTAGSLKCTQCKPDHAPIELGCQRSCEDVTGCGGTAGACDAAVVDGSGNTKHYCSFCGESSKFPIDGICTDTQGSNTGCTNHICSYCAQGYFLYMGGCYSTATPPGNLMCKTANSGICTEAASDKYFAVSGAAKTDQSVLACGNPLGTAVGEKTYVGVEGCSQCTAPAQLEASGMASATCTACGEGKKPNKSGTGCAVCSVENCRHCRVDGVCEECSSGFSLEGGKCISTGTSGGNRSGLSTGAIAGIAVAVVVVVVGGLVGFLCWWFICRGKA

SEQ ID NO: 300 - protein, 635 aa, Giardia intestinalis
MLSAPWIASSMFDRIFFGIIILQLVWTAEATEKSPAVTCDEDKTGGQVSKKCKQNMCTVWIGGSNFCSQCSTEAEHLVNGRCVTADEDTDNKCTAKNDGTCTSCKAGFFLHRGGCYEIGSDIGLLVCDDKTATVNKDGICVACHEGYFKNPASDADSSKESCIACNNTAGADYNKGVQNCATCDAPETPGQDSAEQTVTCKSCMDGYYGTANCQQCHADCKTCTGSGEDKCTSCKDTDKQYFKEGASSDGTGTCVAENGCGDTHFPVAEDKKCYPCGSVNKGGITDCKTCSKTGATVKCLTCENNKKPNEAGTSCFECPMEHCEKCSKDSTCEACGSEKKLSPKKDLCLDACPAGTYTNTNNCNLCHESCAECYGDTEATSCTACYPGYVLTYGNDKIKGKCVLECTEDLTIHCIAGQCDGIIGGSRYCKKCEDGYAPIDGICTAVGEAVVRSADVCKAQSGVCTECKGDYALLSGGCYNTKQLPGKLVCTAATDGSCTTCANGQSQSGGKCPECPANCEKCSNPSTCTKCLPGYYKGANSNCFKCIEDDSNSSNRIIGIASCISCDPPASGSGPVICYVTQQKTDDNTGDNTGGSTNKSGLSTGAIAGISVAAIVVVGGLVGFLCWWFLCRGKA

SEQ ID NO: 301 - protein, 1089 aa, Giardia intestinalis
MCTDSMHLYKGGCYSCDGIDPGNLICKECDRGICTACTYGFFKNPAASQTVDSCIRCDDTTGVSGFMGVVGCQQCWPPDLKQSNTARCTACQLATHKPNTKGDACYKCEITDCFKCKADDACEVCGNFKHLKGVDKPYCVSECGIGFYPAPTPLRQCEKCFAICHTCEGPAETDCTSCHGPENYFLAGKNGVGKCISCGDEDGYAGWSGVANCRSCAPPSDPGVVKCYACEQGYSPIDGECEAECGDYSDECTIESCNVAMSDELVCSRCNEGYAPVNGICTEISPDHPSGCVADKGRCEKCGLWYFLHQGGCYDVWLRDNNFICLEVEAKPEQIGLCKKCASGFQNNKGICVRCRDPYCKTCTQDTNICESCLDGYHDPSFCRRCHDNCKTCVGEGPERCLTCPSGKYLSPIYKNIGVCVDASQCGYGMYGDPYSHKCTSCSAGCATCKNSEEDKCTSCYIRTHFLVTAKYGRGQCIECGDVTNPRGIDGCRECTMEGDSVKCLACKAGYTLVDGKCQSNCQDPNCAADSCVVGISEKLYCRLCKTDGHAPIDGVCTEVSGAHPSGCVTGVAPDSARSCLQCGAGYFLYMGGCYRENEEPGKSVCSWAGVIGYASNSNYGLGLCNACAPGYENQNGICRPCVTVNCGRCQMEDQGEVCTHCMVGYVMDQAGRCSIQATGSCTVPDCAVCADDGKCQSCGPGFFLTSAGTCVNSCRDIPGHYALDATGESPARCALCEIQNCKECRASDSCAVCADGYFSDNGACALCDSKCATCMARDPDGCTSCPPGYAITSESRVGRCERPCTPSAEGCKACDASIDGASYCSVCSVQTAFPLNGQCVGLSARAGPACASVVDGACKKCADGYFLLSGGCYQVETYPGRAVCRAEEQGVCTRGAHGKIVSASGVLRECSVANCAECTADACVTCRVGYVHVNGQCQRCAPGCVACTAPDNPQMCTLCDTGYYQSTTGSAFTCTACSAGNNGMTGVSGCTYCVPPEGKAGSVLCYSFDALPSITPTPEPGPAPDPGSARKTALIAGASVAAVLLVGSVIGFLLWWLLRRRTQPHGTKRVTLNRKRVPTTTSITAPLT

SEQ ID NO: 302 - protein, 691 aa, Giardia intestinalis
MALTVAQQPADPMFGRFVLVGSIVQLAWAAQAAGKAEPAACADETGKCATCDVLIGDKLYCSTCKAEATNHAPVNGVCKDVSSDTAVCKTNAGGKCTECNGQSFMYKDGCYSKDTAPGNTMCSQAAEGKCSAPDNKKNYFVVPEAERKPTEQSVVWCGDPMGVTLKSGQTYKGVDGCTTCEGSPLQAGASGIAVCNACGRDESGAERIVRTATDQATSCVTEAQCIAEEGFFVNTVAGKKCSACEDENCAVCMATGNGKCTRCKDTDKKYLKKGDQSETGTCVTEAECKSGDTHFTDDTGISANGALCRKCAEGGLKDCDKCEKPAGELVCKECTGQKFGLSKKSCVAECPASSAERSGVCTCDDGFEPDSTFTSCQPKSSCRTLGCKTCTGEGTDKEVCTACFEGKYLTPTNQCVPDCTVIEGYYNDRTANRCEKCNSNCKTCLAADGDKCTSCPAGRALTYEAGDPTRGGTCGDACKVSADGTGCETCGAQIGGTAYCSKCKDTQQAPLDGNCAANARVAFCAIVTGGACTKCNEGYFLKDGGCYQTDRQPGKQVCSSTVGGKCTKCASGIDATDGDCSTRKCHESCETCTTANDPNACTTCNTGYYRPQNVGTKCNPCSEGLTGCRQCTASSNAFMCLEMGDSTVDGESTNKSGLSTGAIAGIAVAVVIVIGGLIGFLCWWFICRGKA

SEQ ID NO: 303 - protein, 235 aa, Giardia intestinalis
MLLVAIYLSLGVLAANCSGSTAAANCEAESCETVNNIQICTQCVAGYVPIDGKCVGFATANNCKTAANAAVGAGDKTCGQCTGASFLYMGGCYAVGADGLGKTLCKRAADGACKEGADGYFALLGATPTELSILPCNETTETTLAGDKKYKGVKYCATCTAPEAASGGEIKIATCQTCTDKSKPKDNVCPSPENPNINKNSLPPGAIAGIAVAVVIVVGGLVGFLCWWFICRGKA

SEQ ID NO: 304 - protein, 768 aa, Giardia intestinalis
MMQTLLPLTVACLLVGVFSEEASIYRNGFGYSCNDKVPKCLPNKCITDIILQFLCTECESEYVPINGRCVLTTNETVSKAGCAGSSQGGWCTKCGDDHFLFYGGCYDSSLEWTKIICERAEKGLCTKCANNGYRLTLVFTNPNTTAPERCIYCGDPIGFGGYSGVYNCQNCRQPRLPGTTEADCYGCLQQEMCSFDYRCKPAGDIASFGYCTICPKTHVWSDFACYAIGGATGDSVCLLENIIEIQNRSLCTRCTNPLEAPQNGRCLSISKFDNVCVKDPEKGQCTSCQDRDAEKYFLFYGGCLRKDTSYQIGSQICQEVRDNVCTMCNSSTEEVFTGNNRCWRCGDSANGGIDGCQRCKVGSDGLQCLECRDLYLSLDKKSCLAGCPRGQRGVRDPSSSVHSCTCDDGLYLKDGGCVRCTVENCAECDEAKCSKCRYGYTLSDSRCAETKCKDPNCDACENRDVCTRCSNNYSLDQNGLCVKDCLSSAGYYKATVGDVSRCVACTLGGCAVCESADKCTTCRDGFYLESQGRCKPCSSACATCSGSEAGDCTSCPAERRLQYSDGTKGSCVSQCVQDGSCAACGLTIDGTSYCSQCVKSTEYPRNGVCAPTSSRATGITCTNAFGGQCITCGPSSFRLSGGCYTSRLLPGKAVCTTESDGWCDTTVAGYEITHNGALRACPKNCAVCGGGVCSACNSGFYPERGACRACSKGCATCPHGRACFDCLAGYYFSGSTCKACHKAVPTVQPVCGAGGRDAACVPGVRPCL

SEQ ID NO: 305 - protein, 475 aa, Giardia intestinalis
MCITALVIWMTLLHPDYCCEQSSVDRRYVLLIYYTLAIYISIQKVHSVIIFSMFGRLLLLGFVLQLTHAEGECTPIPSGSPDTCKVCEAVIDGVNYCSQCNDDRSDPSSGAPTDGVCTTDNNECSQKANGKCTQCAHSSFMYKGGCYKDSQAPGNTMCQATDSNGVCTRAKDGYFVPPGADASHQSVIPCGDEEVVTIGSSKQYRGIPNCLTCTAPVNGDGADSTPKAPTCNACKGGFFVDASKESTCTACPANCLTCADGTAERCKSCTAETHFLGATDGQEGKCVSCGTVQDAWSGVANCAKCSKPTGERVPAICKECADGFYLKTGEPPSCAIIEECTGGFFSTTDNTGKRVCTTCGDTANGGITECSECAPTSQTAKTDTVAITCSKCNKGKVSPGRTSCIDACPENSTENPTGTCVCNSGYSPDEAGTSCVAVSTNLSTGAIAGIAVAVVVVVGGLVGFLCWWFLCQGKA

SEQ ID NO: 306 - protein, 2537 aa, Giardia intestinalis
MILFLELIGVTLSICVQAVDSNRGAGTCAENNCKVLDEQYCAECATPGEVPINGVCIPLTDPRAVASGCEGNTGAPLGTSARKCEFCRGGNYFLHEGGCYSVLYNPGNRICRTAASGYCTLCVDGFFLGTTSSTNQCKPCESTCATCKDGTAQSCLSCRSDRFLKNNECKECSAADSGIENCAQCSQESSVVTCTLCKEKYFIKEGKCTACADNCATCTSARPEDCSVCVSKYSYDLTAKKCTQTCDEHDSQATKCKTNKCTALSNRYCSQCASNTDFLVDGQCVSADAKKVCTPFDPPNGTCSTCAKGHLLFQGGCYDVSKSLGQEVCAETSEVQERTVCVRCAQPGFVPVSGVCLRYDEQEVTAAGCVTSRGSAVTSTDTVCESCGKDAFLYKGGCYSNKTSPGNVICDELDGTGGCKVCMKKYYRSGSTCTPCHQSCETCSSDAVDSCLSCKKDVYFEIFSGGRGYCKPCNDSVTTITIIGVANCEMCSPKPSGTIPICTKCTTGHVLKDNNCVQVCHEGAEGTGKCKTGYCNAISNTYCSECATPTECPVNGICTAHLDGHSAQNGACTSCAPGYFLYNGGCYRKGVMPGTLICKDEDDSTSTCSQCEDGYMPSGNGCKVCEVSNCRTCSGDAATCTSCDSGYLLKDSTRRTKVCEKVCEEGIGPGKCIYGGCTVRDNTFCNRCSEETEVPVDGVCSSAEEGTSICLSASSGACLRCAATHLLYYGGCYKIAQPVIEVCKQDSQIVEQGAAYCKACSVASEYPVDGACTAELDGNTCTSSKCTACGPGYFMHREICMRRESHPDICVRAGAGVCEECGKSYFKNPVASTAIDSCIACNDTAGISGYTGVDHCATCLPPKAAGPATCTECADRYVLNEQNRCEESCPEVDESSKATGKCLKGYCNVLNGKYCSKCSLESDYLVDGKCVSANSNVCTQHAQPNGTCASCATTHVLYMGGCYNPAAPPGNKVCAKHSLIGNTLYCFQCGVPTDFLVDGHCLVPSSTNSAVCTLHRVPTGTCYYCSSDYFLMLGSCVSAERAPGNTVCQDFGTDNGICDTCKEGYYASPDRSSVSDSCLLCTEDNGTLKGIPHCKSCKVSNGLLVCVVCEELYRPMNGGTECVQTCVEAEADPKEHRCKKGKCDVLGTFYCSQCAADAEAPVNGVCAPVAGGICIPYEQANGTCKYCTHGYIKYRGGCYETGSLEAEDICDAQDVVTSGAGSFCARCKHKDEVPIDGECKVSDDCTVKEDGICKSCKQGIKSFQIAKDGSSTTVACFTKCPDGMYESAEFCHICDKSCKTCRDSSIKCTGCADGFYLAAERCVACGVPHCLTCSAADTCTSCQDGYYVNGNSCTACTPGCKRCDGTGCKVCKDRFALDNNACTEACPIGLLFTSCAAGYCNVNGTLACSRCALSSSVIIDGKCKANDDACIRTVPSSGTCAACKDTHILYYGGCYDKSTAAGTAICDSQHQAMLGPYAVCKQCKRDGEVPIDGSCAALTDTKAIRSQCVAAASSPTSCTRCGPGFFLHAGGCYELGRSPGAVLCAVAADSAVAGVCTSCASGYYSTGLLDPTKESCILCNNTSETNGYTGVDGCMECYPSEAPRKVICTRCRDKHIPNEDGSQCVQSCNDSGSESGRCKADGCTAMDSLYCSRCALDDEWPINGACTARDTDYVCEKGKGVCTGCLRGYMLYMGGCYDPAAIPGSGICKELLTIGGRTYCKRCNIAGEFPIDGLCTKSVPAGISCSSGLCVVCPEDYFLHEGGCYSITTAPGSEICEVLGTGREVGTCRQCRPGYRHNKETLTCMPCTISNCASCEIDVDYCTECIQPYTLTGVGAGAYCAKVCKRVGQDACSWSSCTVMDGSLCSQCASSDYVPINGVCTLYPGDARSLAGPCVKDAAKGRCTACRGNYFLYQGGCYSASEYPGTGICDERDAAVLEGQVVCGRCLIDGEVPLDGTCAEPQEGLICSKGACSRCGEGMFLFEGACYTKGRAPGTSICGDTAKLTSGCAACEAGFSKTDKGCVRCSDPNCGACGGDPNTCTACRAGYYLQSTSCIVCHSACRTCDGAGADKCKECADGYFGTFVAPGPGTCLACSDTSGRDGWVGVSGCRLCDAPKVAGLALCRDCLPGYKTLSTGTGVTCHAVCPVAYYEAAGSCLPCATDNCAMCTSTACTSCVPEHIWNGEECVPEVCPAQCLCKEQSIACTGCRENAVEVRPTHSSASRCLLCSDARAGGGWTGVDGCQRCRLADRVGPVVCLACESGRKTLALDGVLLCPGDCPADGFWTSGSECIPCAAGCLRCTSATACSMCSQGYYSTQSAVSAPSDCRPCDDATSHNGFAGVAHCAVCTADRARAAVTCHACAEGYGLSGGSCSPCAVAGCARCDGGVCTSCKRGWYLAGDRCLACPSPCATCSSATSCLACADGYFQATPLGGPQDCVPCDQTAPQGLQVAGIYGCGLCQAQAGSSTILCLRCTNGDLPLENYCGGPSTGRRLGPGAIAGISLSMVVLVGGSIGLVLGLTVCKRGCAGNGSLQPLTI

SEQ ID NO: 307 - protein, 738 aa, Giardia intestinalis
MITAFYQYFGQSGAALSFQMSHLLFTRTGSMHYCLVPRIYLLLHNLDQAVMLLVVFYFVLNAFAAPCDPDGNHLTTCAHEKCEKINAFEVCTECKAGGVPIDGFCRPIGSPQVITAGCTKGDGTALEQMATTCGKCGSGYFLFMGGCYRTGSQPGSEVCTTAEGETCTVCNTANGLFKNPAAAPDAGRECLLCWDTVGANGHTGIENCRACTSSGQSGPATCSACKEGYYKDGNACTKCHSDCVTCSGTGQNACTLCANGKYLDGTSCIEVGQCNGNKYPNPNTGKCTACNAAVEQGGIPECTACTYDSKLQKPVCSACGGTKALLKKYVDGSTECVDKAGCAALSTVGTHFLSQDENSCILCSVTGGNAPDKGIAECSSCKKTDLGQAPTCTECLSGFYFDTTCKACGTNCATCSAETDETKCTTCKDGFFLAGTGEGKCISCKDGAEGSYKGVPGCSLCDAPPAAGPAVCKTCDPGYSLQGTTCVKACEDPTACGGTAGACDAMVIDNQGNTKHYCSYCGEENKFPIDGICVESGSANGNTCNNHVCESCTAGYFLYMGGCYKAANPPGNLMCTTAPAGICTEAASDKYFVVPGARSADQSVVACANPLGTLAGGNAYVGVDGCSTCTAPAGRDDGGMAVATCTACGEGKKPSKSGNGCVLCSVKDCKSCKADEKCEECSSGFSLENDKCVSAGASGGNKSGLSTGAIAGIAVAAIVVVGGLVGFLCWWFICRGKA

SEQ ID NO: 308 - protein, 43 aa, Giardia intestinalis
GGGSTNKSGLSTGAIAGIAVAVIVVVGGLVGFLCWWFICRGKA

SEQ ID NO: 309 - protein, 393 aa, Giardia intestinalis
MHVVRGLVCCLQGGRAGRLPEVQAREGPGAVGRRARDREVRRRVHGRRRVCGVRDRHRREQVLHALQGPEHVPAQRRVPCRRPGGPVLHQQGDGVCTACAEGAFLMSGGCYRTGVYPGSVICSVQSGGRCKETKKGYGMSDDGELLQCDPTCLECAAPGPGRCTKCPPGRLLRRASAAATGSCIEPGACADGYYADGDACLPCVVPGCRACGRTSFCTECAGELFVGLDGRACLRECSGDRVVGEASGGTRRCWCERGFAPALDRSGCVPAAECPPGMPWCASCDESGRCLSCAAPGHNIQVDQRTCAEGCGDRAAPDQGVCVCEIGTVLTRGACVSTKDAAKKKTAAIAAGTTAGILVVGALAGFLCWWLLRRGRRIGSSSSVTSLIHSKSM

SEQ ID NO: 310 - protein, 615 aa, Giardia intestinalis
MCPFDFRCTFVEELELGYCDSCPRDYVWSQFGCYSIGSIIGNSICLPRNVIDIREQTLCTQCANSSEVPRNGQCRSISRFEDICTKNSETGTCTSCKDRDKKQYFLFYGGCYLFGNTLDDHIGSQICQTVQNNVCTACNSSIKEVFTKDSRCWRCGDTANGGIAGCQKCEMKDDALQCLECRDLYLSLDKKSCLASCPDGQVGAFDPSSKSFICACDDGFYLNDGKCVKCTVENCAECNESKCSKCRYGYTLSDNRCAETKCKDPNCDACENRNVCTKCSNNYSLDQNGLCVKDCLSSAGYYKATVGDVSRCVACTLGGCAVCESADRCTTCRDGFYLESQERCKPCSSACATCSGPEAGDCTSCPAGKRLQYSDDSKGSCVSQCVKDGSCAECGLTIDGTSYCSQCVKSTEYPRNGVCASTGSRATGITCANAFGGQCITCGPSSFRLNGGCYTSKLLPGKTVCSGERDGWCENVAAGYGITYNGTLLTCPEHCKVCTDGSCSSCNSGFYPERGACRACSKGCATCPHGRACFDCLAGYYFSENTCKACHKAVPKCSLCAVPEGATQPVCLEYSRSLRLALSAGAISGITIGAVLVIGTVTAVLVWLLVFRKKS

SEQ ID NO: 311 - protein, 387 aa, Giardia intestinalis
MLVTLLLICTVIQANCTNNLTSCTRNPEAQCEVDGCIACVEGNTRECKTCGPDYTLNPDTKQCTRNPEVQCNTPNCKTCDNPKTDREVCTECNGDSYLTPTSQCVPDCTAIGGYYGDSADRKCKKCSSECAGCVGPASNQCSACPAGRALTYSDAGHPGNGGACGDACAADKNGCKACGAKIGGTDYCSHCSDNAQAPLNGNCATSSARVAFCAAMGAGVCTKCAAGYFLQDGGCYETNRQPGKQVCTLAGGTGECETCANGRQPNSGACPSCHPTCKTCRDTDSADACTMCAAGYYMLGSGPEACVSCEADSGSVKGVSGCLSCAPPSGNTGPVLCYLTKDDGTGGSTNRSGLSTGAIAGISVAVVIVVGGLVGFLCWWFLCRGKA

SEQ ID NO: 312 - protein, 287 aa, Giardia intestinalis
MITCTECATDNLSPLKDECMAACPAGTYANNDVCAPCHKSCASCQANDKETSCTACYPGPSLLYGVGGATGTCVKECTGEFGANCADGQCTADVGGAKYCAQCKDGYAPIDGVCTAVTTGRDASMCTAAGGKCTACKGSYALISGGCYGTQKLPGSAVCTAASNGDCSACANGQQSSGKACPACPAGCSKCTGSAPSQQCSECLSGYYKSETKCAKYDVSNGGIVGVFGCVSCAPPPSNTGSVLCYLMRGGNNTNGNINKNVLITGAIVDISVMAIVVGGLVSFLCR

SEQ ID NO: 313 - protein, 279 aa, Giardia intestinalis
MYASSSGNICKPCHTSCAECTAYARGEDSCTACYLGFVLRKGSSEATGTCIPECTGKYAENCEENMCSAVIWGSKYCSKCKTGFVPVDGICVSSTARAPTGCIPGDGVCTACTDSYFLQSGGCYQSTAFPGNKLCTTASQGKCTSCANGQQADNQGSCPACSSICATCVSGSPYQCQTCLPGFYRSEINCIRCSGNDNGITGIANCLTCAPPPSGQGSVICYVKKDGTSDGDDSTGGSTNKSGLSTGAIVGIAVAVVLVVVGLIGFLCWWFIHRRKARF

SEQ ID NO: 314 - protein, 855 aa, Giardia intestinalis
MRRARERADPALAPRGRGSLAQLGRPDRLCALEGTPGPLQSCGQACQGARSQRAPGGLGAGQGSSVLGPSRASHGACSRGLGGAPGWQLTPLPDARRVHWEGPCSTGHHQAGSAGRTPMLFAVLYLALGTLAAPCQPDGDHVATCQTDKCEMVDSAEICTGCKAGGVPIDGFCWPASSLPAALAGCAPGESPGVCTRCSSEGHFLFMGGCYKAGSSPGNEVCAAAEGGRCTACRTGGSVFQNRADSPALGSECILCSDASGSPGTANCETCTGPTDSAGKATCKTCRDGYFLESNECKQCGAGCSECTSSTACTLCMPGKYLKGDKSCSEVCDAKQYADPNTRECTACSESCKVCAYDDTLQQPVCSECEGAKPLLKKKIDGTAECVDADGCATVGQDGTHFRSDGDTKCIPCSDSSGSANDQGITSCEICSKEASQKPVCKACVSGFYLSGTCKACVGNCAKCGSTGSIQDCTECLPGYFLRDTQGTKECVACGDTSKNGVDGCAECTSEGAVKCTKCKPNYRQSREPAAGVTCTRVCEDEAACGGTAGACDAVVIDDAGKELRYCSFCGDSTKIPIDGKCVAAGSANGNTCSAGICTACANTYFLYMNGCYKIGQTPGQYMCTAAATGFCTAPDSKKKFFNIPDATKQEQSVLACGNPLGTVTGADGTAKAYVGVPSCTACTPPSAPSNGGMAAAKCTACEAPKKPNQDGSGCTLCAVAECKSCITDNVCEVCDGDKKPNKAGSACYACSPEGCSHCSADNRCEVCADGGKRPSLDGAQCITCNIDRCTRCSAEGVCGECEAGYAPKDGKCEPGSTGPNLSTGAIAGISVAAVVVVGGLVGFLCWWFICRGKA

SEQ ID NO: 315 - protein, 612 aa, Giardia intestinalis
MCPFDFRCKVANGNGAGYCDSCPRDYVWNQFGCYSVGSIIGNSICLPRNVIDIKGQSICIQCANSSEVPFNGNCETIVGSSDVCVKDAETGRCTACKDKGKTSYYLFYGGCYSASGTQTGIQICQTVQKNVCTTCDSSVKEVFTKNNGCWRCGDTANGGIAGCQRCETKGDALQCLECRDLYLSLDKKSCLAGCPGGQRGVQDPSSKSFVCACDDGLYLKDGGCVKCAAENCAKCNESKCSKCRYGYTLSDSRCAETKCKDPNCDACENRDVCTRCSNNYSLDQNGLCVKDCLSSAGYYKATVGDVSRCVACTLGGCAVCESADRCTTCRDGFYPNGSGGCKACNPACATCSGPEAGDCTSCPAKRRLQYSDGTKGSCVSQCVQDGSCAACGLTIDGTSYCSQCVKSTEYPRNGVCASTGSRATGTTCTNVVGGRCVVCGSSSFRLNGGCYTSKLLPGKTVCSGERDGWCENVAAGYGITYNGTLLTCPEHCKVCTDGSCSSCNSGFYPEKGVCNACPEGCATCPHGRACFDCLAGYYFSENTCKACHKAVPKCSLCAVPEGATQPVCLEYGRSLRPTLSAGAISGITIGAVLVIGTVTAVLVWLLVFRKKS

SEQ ID NO: 316 - protein, 650 aa, Giardia intestinalis
MTASKRAVMFYTFLWIGLVLQLARAKGECTPTPSGGPETCKACDAVINGKEYCSQCNDSGSELSSGAPTNGVCTADNAVCSAKKDGVCTTCKGESFMYKGGCYAKADEPGNTVCETVQNGVCTAAKAGYFVPPENDRDASHQSAIPCGSEEEIVVKNDHKYKGVPHCTQCNTPEKATDTNTAKAATCTACENGYFVDSGTCTACAANCLTCAGEADNKCKSCTAETHFLASDASEGPCISCGDATQGSGAWKGVAGCAKCTKPQSAGPATCTECAADKYLKTDSGATSCMSAEECKDGFFPTTDAQNNNKKVCAKCGDTGNGGIEDCAKCSLKAASAGAGPLVTCSECSSKKLSPLGDACLENCPAGTYPDNRGSAGICAPCHNSCANCSDNADTSCTACYPGYVLKWGSTGDTGTCIKECTGDFMAHCKSGGCTLNVGGSKYCDQCEDGYAPVDGVCISVTPTARDASGCKASGGKCTECGPNYALLSGGCYNTNKVPGNSVCETADGTGKCTKCANGQAYADGNCPSCSEGCGKCATNTNQCDTCYSGYYKTATHKCFKCATDSDSGIKGVENCISCAPPTSPPGSVICYVKTDGTSGGGGDSGSGGGSTNKSGLSTGAIAGIAVAVIVVVGGLVGFLCWWFICRGKA

SEQ ID NO: 317 - protein, 827 aa, Giardia intestinalis
MLGFLSVLLLASLYKASKTTYYNSFGVECREEHSNCVQDRCIPIGTRQACTQCIPGYVPIHGICTLYTNSISSVCIPDDASSPTRCIACKSETDVFLFYGGCYNINISTGDKMGEFVCAEASGGTCTKCREMTGGNYVFTNSDTGAAEKCILCADTVGFGSYKGVSGCFSCWPPINNKIGTPLCNKCYYTMTTVYFGPVDYHCQDQGSHNCNRGNCTSCYKTHLFYAGGCYSRHTMTGLAICAKSNQYELDNVTICAERSNASYAPKDGACTLVKKNTSSRNSFSECTKDESKGLCTACSSSSTFFLFYGGCYNKSSSLGSRLCLTVTTGDCTQWKGDFNFIFPKDTTGARYLCSDAAHNGIPRCATCSYEGNVVNCTRCSAGYLGMDGKSCNESCDGNTQGACTELIEKVSSAKVLSYQCVCKQEFYNNSGTCAPCAESCAVCKSSDAYGCLQCVPSKILNFSVTVSESTNCIDDCTASGECVECGVTIDGSKYCTRCRDPDMYPFNGVCTADAQRSSYCVSKESGTCTACSQNTFLMSGGCYKMDTYPGNTICIEESGGKCAKTKEGYKVSADGKLQPCAPGCVKCTAPGLGYCTECPLGVYLKKTSSAALTGTCASFDDCTNRYYIHGDACLPCVVPECRACGHTSFCTECAGELFVSLDGRACLRECSGDRVVGEVSGGTRRCWCERGFAPALDRSGCVPAAECPPGMPWCASCDESGRCLSCAAPDHNIQVDQRTCAEGCGDRAAPNQGVCVCEVDAVLTKGACVSAKEVARKRVAAIAGGTMAGVVVVGGLIGFLCWWFLYRGKRAGASSSTTALVRPKSI

SEQ ID NO: 318 - protein, 684 aa, Giardia intestinalis
MLLIALCFMLSALAEGCQEHGDHAVTCQVNKCEIVNSIEICTECKAGGVPIDGFCWPASSPSAALAGCVPGASSGVCTRCSSEGYFLFMGGCFKKGSTSSQTLGDSICETAQDGRCTKCKTDGNVFQNKADSPALGSECILCSDTTGANENKGVDKCTKCTAPGSKTGTATCTECAAGSFVSNQACTACNSPCATCEASADTCTSCETGKYLKENQCVAKGSCGADKYEDDASMTCVACSTIQDCTACTMDPTTKKPKCTNCGVKIPRIGLDGTSTCVEKSYAGCTGADKELFMKEDQSACLLCGDATTGPDAKDKGVANCKTCTKASATGAAPVCETCKEGFFKTSGALCEACGTNCATCSAKTDEAKCTKCKDGFFLAGTGEGKCISCENGNDSGYSGIAGCLSCKTPTTPGPVSCDRCKIGYMLKGTTCVKACEDNTACGGTAGACDAMVIDDQGNTKHYCSYCGESNKFPIDGICTNNKGTNNGCTDHTCGYCARGFFLYMGGCYDVSKAPGNYMCKIVGKEGICTEAANNKYFVVPGATSTEQSVLACANPLGTLAGGNAYVGVDGCSTCTAPAGRNDGGMAVATCTACGEGKKPSKNGNGCVLCSVKDCKSCKADEKCEECSSGFSLENDKCVSAGASGGNKSGLSTGAIAGIAVAAIVVVGGLVGFLCWWFICRGKA

SEQ ID NO: 319 - protein, 539 aa, Giardia intestinalis
MSSCHQSCITCDGQDAASCTSCNSTSFLAVQGNNKGYCISCNTETPVHGYAGIGGCSRCMLFSSIDVMPMCLECFEYDYMVSIDGRSCVTSCGVGASPNYYTRQCTCTTGYGLDQGNRAQGCVRCKIHSCALCTDNSDICNACEIPFGLSLDGKSCLETGGCPANCVCENNGTDAGTTCVSCKKKYFLQPARRICLHSCPIGYAANPVTNTCDLCPPNCYSCEQAVEDQCTSCVDRYVIYKTSSSVPTIGRCIPECTEAAVGPCTECHAILGSANYCSKCSSGFFPLDGRCVPTSDQQASTCIQADKGFCLKCTMGYFLHQGGCYSSLYTPGKLVCAAAERIDPAAYGTCRACTHGYHRTSDGVCIKCTMAGCLSCSSHPDMCTFCSNGYYSTQISVDSEDVYCNHCAPGCFFCEDPSPSACNLCAPGYFWTSSVHGCIRCDNSTVPGVLKGIKGCKQCLIPSSEISVVCLDNDPASPFAFPSPNTNKTTLILSITLPLVVLILATIIVTLVIIFVKRKTAKRPRPSTDPVTLATMASE

SEQ ID NO: 320 - protein, 822 aa, Giardia intestinalis
MTLASLVLILTYLLGVFSSDGESIYHNGFGYPCEDEKSNCLQNRCLRDLSTLFCTECASTHVPINGRCTPAGDARVTTAGCVKSSQGGWCTECGNNYFLFYGGCYELDEKWQTSICHRAENGVCKECGKGSEKYTQIVFTNPNATSPERCIYCGDVVGFGGYNGVYNCQHCSQPRLPEKTVPDCNECAEGTMCPFDYQCKPADEMAEFGYCEYCPKTHIGTEYACYAIGSITGNSVCLPSNIIEVQNRSLCTQCVNSSEVPRNGRCLSINKITDACTKDSKTGKCVSCKTSDEVKYFLFYGGCYAIEEEVMDQIGSHICQTVQDNVCTACNNSAEEVFTKNNRCWRCGDTANGGIAGCQRCETKGDALQCLECRDLYLSLDKKSCLAGCPRGQRGIQDSSSKSFICACDDGFYLKDGGCVKCAAENCAKCDEAKCSKCRYGYTLSDDQCAETKCKDPNCDTCENRDVCTRCSNDHSLDQNGLCVKDCLSSAGYYKATVGDVSRCVACTLGGCAVCESADRCTTCRDGFYPNGSGGCKACNPACATCSGPEAGDCTSCPAKKRLQYSDGTKGSCVPQCVKDGSCAECGLTIDGTSYCSRCTKGTEYPNNGVCASAGFRTVTSRCLNIANGQCALCDTDSFKLNGGCYTSKLLPGKTVCTKESNGWCDSITSGYEITYNGMLLTCPKNCAVCSGGICSVCNNGFYPERGACRACSKGCATCPHGKACFDCLAGYYFSENVCKACHEAIPKCSLCTVPEGATQPVCLEYGYVSRLAISTRAISGIIISVVLIIGIVAAVLVWLFIFRKKNKVSPLYNQSILLNTQ

SEQ ID NO: 321 - protein, 693 aa, Giardia intestinalis
MFDRLLFAGAVLQLAWAVCEANESGSAGSCKVCGVFIGESEYCSECNEPTTHAPVNGQCADVNTEGSSKTLCPQHSAGKCIQCGDNAFLYMGGCFSSGEGTPGKSVCHASSAGVCTEAAPGYFIIKGAKNTEQSVLSCGNTTGISVTADSGSTYKGVTSCAECSAPDAAAGARADKVAKCTKCRASKYLKNNECVDNAEACGKGYAAKQDAINGNKCIKCSNDQNGGITECEECAVTASTLESKGALVVCSKCTGKKVQPDKKGCIQDCPPYSSEKPEQSGICECNQGYIPSESGTECKEQPVLPEAQCSTSDCKVCSNPKKANELCTECNVDRSLTPTNQCVDKCDKLGNYYEGTNEQGKKVCRECIVANCRVCSAYGQCQTCKDGFYLNNNECKLCNDTCKTCEGGSESDKCTSCKPGKILRYMSATMGICEAECIVDPTQASGNCKACNLLIDGTKYCSQCSQIATEYPQNGVCKGNTKRAISPCKSGKIQDGKCTQCDVGYFLMEGGCYEDNKYPGKSVCSKTNVGGDTCDNVTPGYKLATGTLTHCIEGCSKCSDESSCTECLTGYALSGTKCIPCATGCSKCNANDATKCTACSIKYYLSKEKCVACDKNDGGSITGVPNCLSCTPPSGDTGSVLCYLMKDDGTGGSTNKSGGLPPGAIAGIAVAVIIVVGGLVGFLCWWFLCRGKA

SEQ ID NO: 322 - protein, 488 aa, Giardia intestinalis
METVLGGGEGTCVGDCTQTPGYYGDAGEAQNKKCKKCAAGQKPNTAGDKCFSCPDENCERCDSENKCARCNNGEPPADGACPVAGKGCHSSCDGCTEDAMTNQANKCTGCKEGLYLKPEPTDGQSGTCLTAADCTSDQTHFTKEKAGDSKKMCLPCNDATHGITDCKKCTLKTLSEGAEPIVVCSECADKWLTPPGNACLESCPAGTHVDNVNGVSVCTPCHDTCAECNGNADAASCTACYPGYSLLYGSGIAGTCVKECTGEFGANCADGQCTADIGGAKYCAQCKDGYAPIDGICTAVTPAGRASVCTAAGGKCTACTGDYALMSGGCYGVAKLPGKSICTLASNGKCTMCAANKQAPIQEKCPECSEGCAKCADSNACTECYSGYYKGAGNKCFKCTSGDNAVNNPITGVADCISCAPPTGGNGGPVTCYVKADGTSGGDDGTGGSTNKSGLSTGAIAGIAVAVVIVVGGLVGFLCWWFICRGKA

SEQ ID NO: 323 - protein, 530 aa, Giardia intestinalis
MLVGAILFLVVAFAVECNPPITGCLECATEATTCTKCDKEHATNKYLKDGSCVTGDECTGAHDHYIDSTDPSSLVCKACGKNEKPNTAGTQCFACTDSNCRRCNEANKCAVCTTGEPQSDGSCPAATPGCHSSCKECVNGASTNEDDKCLSCSGDNYLKVVDTATHSGVCVSVSACTSDGSHFTKEVADSNGSKKMCLPCNDATHGITDCKKCTLKTLTEGAEPIVVCSECTDKWLSPLGDTCLEKCPAGTYFERGTDNVGVCAPCHNTCAECDGNAEATSCRACYPGFVLSKGDADSTGTCIPECTGKYVENCEANQCTAVVGGSKYCSKCKTGFVPVDGICVSIASRAVIGCTPGNGVCTACTDSYFLQSGGCYRSTAFPGNKLCTTASQGKCTSCANGQQHTNVGTCPACPDGCSKCTAGDDPKECSDCFPGYYRSGTKCMKCDASDGGIIGVPNCISCAPPISGSGPVTCYIKADGTSGGDDGTGGSTNKSGLSTGAIAGIAVAAIVVVGGLVGFLCWWFICRGKA

SEQ ID NO: 324 - protein, 242 aa, Giardia intestinalis
MTLLLLKFGLIIAACVTPVMKSSQSGDCLVDKCTVLDKQYCAEHATPGEVPINGVCIPLTDPRAVASGCEGDAGAPLSTSARKCEFCRGENYFLHEGGCYSVLYNPGNRICRTVASGYCTLCVDGFFLGTASSTNQCKPCESTCATCKDGTVQSCLSCRSDRFLKNNECKECSTDSGIENCAQCSQESSVVTCTLCKEKYFIKEGKCIACADNCATCTSARPEDCSVCVSKYSYDLTAKSCT

SEQ ID NO: 325 - protein, 712 aa, Giardia intestinalis
MMAPKRTSMFYVFLWIGLVLQLARAECTPTSGGPETCKACGAIIGEVSYCSQCNGNGSESAPTDGVCTTDNAVCDPKADGTCTTCKEKSFMYKGGCYATNKEPGSTVCQDAVDGVCTQTKDGYFVPPDADASHQSVIPCGDEEVVTIGNGKKYKGIPNCLTCTAPENGDGADSTPKAPTCNTCKEGFFGPSEEPPCQRCTDENCATCGATGEGKCSKCKSADASGAKLYLKKGEGGTGTCVTEPACVQVEGYYIEGEECKKCSAPCIACTGQATHCTKCDLAGETPYLKDNNCVNEAACISGNTHYANATTKECKLCADGGLRDCTTCEIISANLVCKACTSGDKNKFGLEKKSCVKDCPENSKADSDNICACTEGFEPSSDWSACRPKSSCKTPDCQTCDNEGGENEVCTRCFSTHYLTPIKQCVRSCEELGAYYTDSNNACQLCDPSCAACNGEGSEKCTACLPGKRLQYTDENSPSGGTCVDGCKPQSGAGGCETCGTTIGGTNYCSKCSMPEEVPINGVCKADNSRAPICSKKDNQGGCATCASGYFRQDNGCYKTDRQPGIQICTLASQGDKCETCANSLPPSEAGLCPLCDSACKTCSSANDANTCSSCFVGYYQVGTRCVKCDTNDPNGNKPITGVKDCISCAPPDGGNGGSVLCYLTKDDSTGGSVNKSGLSTGAIAGIAVAVIIVVGGLVGFLCWWFLCRGKA

SEQ ID NO: 326 - protein, 833 aa, Giardia intestinalis
MLCPVKRQMLGFLLTLLFASFCESSRDTYHNGFGVACNDTQTNCAQDRCLSIGPWTPCTQCVSGYVPINGTCQKYPRDSSPPCTPDDPNSPTRCIRCTSTANVFLFYGGCYTIDDSSSSNIGKFLCSEALDGVCTKCFERDYRRDVFTNPDQTAAEKCILCSDTVGFSGYRGVSECLYCLSPITEKIGIALCIKCDYAAQDKNVYPIDYECQASGPHECINGYCISCYKTHLFYEFGCYSRHSSTGLAICAEANQYELDNVTICRECTNSSCAPRNGQCTLIKNEAFPGNSFSECKKDDTRGLCTGCSNSANYFLFYGGCYNARFAPGSKLCSAVVSGVCTQWNTQFGLLFNKSDKNGNLCGDTESGGISRCVMCNYENSALACTRCSVGYLEINGKSCSKSCGGDTQGKCTEVAEEGGLVKILSCQCVCNSGLYNNSGTCASCMDSCIVCTDGTLNGCQQCSPGKVLESSVITSGNAKCIDECTTHGSCLECGLTIDGSRYCTRCRDPDVYPLNGVCTKDAQRTSYCASKASGTCTACSQNTFIMSGGCYTTNTYPGNIICDKQADGKCTATREGYGISDDGKLQPCAPECLECTAPGPGRCTKCPPGKLLRRAPAAATGSCIEPGACADGYYADGDACLPCVVPGCRTCGHTSFCTECAGELFVGLDGRACLRECSGDRVVGEVSGGTRRCWCERGFAPALDRSGCVPAAECPPGMPWCASCDGSGACLSCAAPGHNIQVDQRTCAEGCGDRAAPNQGVCMCETGMVLTKGVCVSTKDAAKKKTAAIAGGTMAGVVVIGGLVGFLCWWLLYRGKRTSPSSIVTVSGRSKSI

SEQ ID NO: 327 - protein, 500 aa, Giardia intestinalis
MFAKLIFISLILQLTEAIRPAGRIESGNACPTLDGAGCKTCDSSSGEELCVTCKQDTDFLQLDKKSCRASCTGDGVIEDSGVNPKVCKCDADKGYQLQGGACVKGQNNACPTLDGAGCKTCDSSSGEELCVTCKQDTDFLQLDKKSCRASCTGDGVIEDSGVNPKVCKCDADKGYQLQGGACVKTQPSACKTENCQECTNKGAADEVCTKCNPTHYLTPTNQCVPDCTAIKGYYGDANEKKCKACNPECAECVGPVNSQCSACPASKALTYGDSTYPNLGGTCGDACTADKNGCKVCGAKIGGTDYCSQCSGTQVPINGVCVENASGRATLCTAKGDGTCASCAAGDLLKDGGCYKTDRLPGRSICTTASNNKCTKCANGLNADGNGVCGECHSTCATCSAAGAADKCKTCATGHYKENADNSADGTCKRCSEKIPGCKQCTSSSADSVICLESEAGTGGSVNKSGLSTGAIAGIAVAVVIVVGGLVGFLCWWFLCRGKA

SEQ ID NO: 328 - protein, 560 aa, Giardia intestinalis
MTAPKRALMFYTFLWIGLVLQLARAECTPTSGDSSTCKICGAIIGGASYCSQCNDSGSDPSSGAPTDGVCTADNNECSAKKDGSCTQCAQKSFMYKGRCYKDSQAPGNTMCETAQDGKCTTARVGYFVPPGADASHQSVIPCGDDAVITVKDDKKYKGVVHCAQCNTPDAASDTVTAKAATCTECVADKYLKTDSGATSCVSAEECKDGFFPTTDKSGKRVCVSCNDTSNGGINDCAKCSPRVSVAKEGPTITCTECATDNLSPLKDECMAACPAGTYANNNVCAPCHKSCASCQANDKETSCTACYPGHSLLYGVGGATGTCIKECTGEFGANCADGQCTADVGGAKYCAQCKDGYAPIDGVCTEFKSNTRNLPECSPKNGKCTKCTGNYALLSGGCYNTQTLPGKSVCKAVANSNDGKCKTCANGQTPDLATNFCPLCDSTCAECSTKNDADACTKCFPGYYKTGNKCIKCTESSNNGKKIDGVPNCLSCEAPANAGPVICYAKTDGNNTGDDDGAGGSVNKGGLSTGAITGIAVAVVVVVGGLVGFLCWWFLCRGKA

SEQ ID NO: 329 - protein, 424 aa, Giardia intestinalis
MFYSTVLILCELVLVTSKECSNSENCAAGDNCLDIKVSNTPKEVCTKCAATHVPINGACQAKDGQSAVCTPPGVADGTCQSCKGENYLYEGGCYTACPQGAPNPETNTCDGVPAPDCNIPNCEACSEDKKTCTTCQPGHLLTPEKNACLGACPAGSYAAGQACTPCDPSCAECSGAGASRCTACPAGKMLRYADEGRPADGTCAEGCVEGPECEACGLTIGGTKYCSKCAADRWAPRNGVCADTAAARSPFCTSASGGACTQCAGGYFLQEGGCYQTTRLPGKGVCAALTGDGKCQRCANGLAAVSGTCPLCDSTCATCTEPGQPGKCSACPPGRYLDAGNACRPCTEASGSIQGVAGCVSCAPPYPPSGAVTCYVKRGDSAGGSVNRGGLSTGAIAGIAVAVVVVVGGLVGFLCWWFLCRGKA

SEQ ID NO: 330 - protein, 638 aa, Giardia intestinalis
MLLIAFYLLLSVLAAACSAEGTVKDNCEADHCEMVGTTEVCTQCKTAGNVPINGVCTLHSEGAVTSAGCKKKDGNTNVGVDDKTCGQCDGAYFLYKGGCYSTSDATGQKLCTAAAGGVCTKAAAGYFIPPDAQKTDQSVIVCSDVTEVTLTNNKKYKGVQHCTVCTAPGAAADSTAKPAVCTECSEGFFVASSGSECKACGDENCAKCEREGKKQCNECKATDTKVYLKIEADSKTGECIEKASCNGDYFPNDNVDGKKQCIACGSGTHGGVANCKTCTLKGKPEGSILITCSVCTAGTSKPSTDGTKCVQCSVDGCDNCNEDNVCAKCTNDKKLTPTKECIDKCEKLEGYFNGNDGTCKMCNSVCKTCSGEDLHQCTSCPARKVLKYTTEGTPENGSTCVDECKTDTNGCAECGATIGEARYCSKCSDAKQAPLNGNCTVSARAAASCKKVEGGVCKECEAKYFLFEGGCYETARQPGMQICDSIANGKCQTCANTLKADTSTGACPSCPTGCATCTAAAAGQTYTCQTCFTGYYLDSTKNLCIKCTESSGDIQGVTNCASCAVPTSNSGPVTCYAKKDGTGGGDNSDGDNSGSGGGSTNKSGLSTGAIAGIAVAAIVVVGGLVGFLCWWFICRGKA

SEQ ID NO: 331 - protein, 654 aa, Giardia intestinalis
MRAYRRLLRLVQKSRLPLLRRLLRLGQGPGEPRLQQGGGRDVQGVPEGRAVPVYKPRRRRGGAVHPVPRQRRLRAVQGRRRLQVLPAPPRRGDVCRVQLVPEREARPDRRGVHGAGQALVRRRGLLELLHDPRPAQRGCYEKAKAVAQKICAAEDQFQALNITACRRCALEGEVPADGRCIRAALEPKCSPDPAAAGSCADCKRGGVSYDTFLFSGGCYNTSGYVGSQLCTKVNDRAECDAWNTGDYGVFKLPDYHMAYLCSNTSAGGVQGCSRCRYDSTKKKAICYDCEYDMLAFDGMSCITGTDCKGDHRQRRCSGSSERGCRCECADKYYRSGEQCSACASSCLRCNSQEETSCTLCPSGQALAYNGNGTAGTCKAGCTPDSTCEACGLEVDQTKYCSKCKDPAQYPLNGACTPASSARTSVCQRQSDGACQQCSSDYFLMGGGCYQVSKYPGRFVCKQADGGKCVDTTDEYSINSKGELVDCNSNCETCVEGQRTQCLSCAPGRYLKKEGAAPHGACVSRADCSDGYYADHDAMECLPCGIDGCSLCHLIGASVRCSRCRGASLVGLDRRSCTTAAPENAVEFWGMYVCDEGSVLSGDACVRKGSQDAGGALSSRASIGIGVGASLVVLALVGVLAWWLVFQRRRTRGAQ

SEQ ID NO: 332 - protein, 674 aa, Giardia intestinalis
MGERGPPARVAVARMGDCSGSRLQPHLGETESKSLAQINKAMLGLLFLRVVVSSATGVFGEKCTTAVQKDTCATNKCITVSGSELCRECIGRKVPIDGICKDITDFSVSLYGCEHSSGTGFCTSCKDTAFLFYGGCYTINKAPGNLVCSKAESGKCTECRKGARSLFTNPDSSAAERCILCYDNVGFGSYKGVDGCRYCLPPFAEETSAECNWCQNEKYGPVDGVCTDPGKHSCADGACSNCYMTHIQHNGGCYEKTGAVAQKICAAKDQFQALNITACRKCALEGEVPADGRCIRAALEPKCSPDPAAAGSCADCKRGGVSYDTFLFSGGCYNTSGYVGSQLCTKVNDRAECDAWNTGDYGVFKLPDYHMAYLCSNTSAGGVQGCSRCRYDSTKKKAICYDCEYDMLAFDGMSCITGTDCKGDHRQRRCPGSSGRGCRCECADKYYRSGEQCSACEGSCLRCSGPEAASCTLCPPGQALAYTSDGEGTCGAGCTPDGTCEACGLEVDQTKYCSRCKDPVQYPLNGACTLGGGARASACLRQSGGACQQCSSGYFLMGGGCYQVGRYPGRFVCRRADGGRCVDTTDEYSINSRGELVDCSPDCETCVEGQRTQCLSCAPGRYLKKEGAAPHGACVSRADCSDGYYADHDAMECLPCGIDGCSLCHLIGASVRCS

SEQ ID NO: 333 - protein, 833 aa, Giardia intestinalis
MMALIFLLLYGIFSECAQDSDCGGASGVCNVTIGGRKYCSKCEGARVPVNGDCRLLSLSRSICVVPTDNNPTPGSCSGCIRDFLFYRGGCYRTAALINAICKEKHVVEEGMYCGACGIEGDVPIDGVCVPAGSAAGNTCDKGVCTACTAGYFFHYGSCYRFGGSPGSIVCPSQSDTAGSVCGSCGPRFVKNPNASSSATSCLACYGLDGTLFCERCRMSVLAGADAKPTLCTQCQLGYVPVDGRCLSNYSALAALAGCSDPRGNGLCGACSPGYMLFYGSCYSVDGPLAQAICAAEDQIYVNGRVLCKKCAQPDHYPLNGVCIAQGSDAGGHTCSGGSCTACSSKQTADNTPEFFLFYGGCYDITHPIGKSICSAIAGSVCTACASSDSSNVITVAADDQSSTCLACWDSAIGGAANCGGCSPGGDGPAKVVCTRCADSTAPGEDGACPRALPPATPEGCAVQGCRACSEDSATRCDACFDPLIMKEDGAKCFGSCLALGPGYYNASGTCARCVENCLLCADGASCSRCADGYYLEVSGDGSSTGACRPCAAGCSTCNNGTDVGCTTCLLGYYLASTSRVDRAAKCVACSADENGYTGVPNCIACRSTVGTGGAKNVICQKCADGYLKETEQGKTVCEKPPPTCTVELCALCVADDPSRCEHCTAGAYLCPRTAACTKDCASCGGSMYPDGDLGECQPCDIPSCRVCATGLKCESCAEDAVPISPDVYHTACMGCSDTGGMDGWVGLAGCTTCELTDRGGGSVNCLDPGYYRRGGLGGGAIAAIVIAVLLALAVVGFLVWWFVFRKGRSSRRGGAKYTSLMRGESYDYRQSLI

SEQ ID NO: 334 - protein, 714 aa, Giardia intestinalis
MKDPGRHWEGPCSTGHHPAGSAGRAPMLFAVLYLALGTLAAACQPDGDHVATCQVNKCEMVDSTEICTQCKAGGVPIDGFCWPFSSPQVITAGCTKEDGADLDSTANTCGRCSGADHFLFMGGCYNQKVGIGGTICTAASGGECNTCAKVGWLFENPAESPAPGTKCILCSDTVGDGKTMGIANCNACTAPRATGAATCVTCRPGYVKDQAKNECKKCGSGCSECSESNPSQCSACEDGNYLNTNTCVAVDGCGGDRYADPTTGQCKPCNGITDCETCEYDEAKGKVKCKTCGSSKIPRTAMDGTSTCVTKDYAGCAGANKDLFMKEDKTCVLCSTVSVGADPNDQGIAGCKKCTKESATPPTCSECFDGYYDSGNGAPATCVACGENCATCVKDTKDLCTTCKSGFFMKGNGPGECLPCDGEGGAEGCGICTGGTSFTCNSCKPNYRQTGARSGSVTCTKVCEDETACGGTAGACDATVVDENGTTKHYCSFCGESGKFPIDGKCTNVNAGNDGCANGVCKSCTTGYFLYMGGCYSTANPPGNLMCKTANGGICTEAASDKYFAVPDAAKTDQSVLACGNPLGTAVGEKTYVGVEGCSQCTAPAQLEASGMASATCTACGEGRKPNKSGTGCAACSSRTAGTAGWTVYVKSAAVASAWRVASVSYPPALVEVTGAASARGPSRHAVAVVSSSSGASSASSAGGSYAAARRRLR

SEQ ID NO: 335 - protein, 771 aa, Giardia intestinalis
MAGWEARPPDGPQSQRPKDASSQALAEWVTHGEQRRGRRADHRHSDRPGCSGGRGPSGILHQELPHPVDTAMLLIALLFVSSTLAADCQPDGDHAATCQTGKCEAVGSSEICTQCRAGGAPIDGFCRPVGSPQAIAAGCTKGDGTALEQTAATCGKCGSEYFLFMGGCYRTGSQPGSEICTAARDGKCTTCKTGGGVFQNPAIDAVLGSECILCSDTTDRGGIMGVENCAACTAPDNSAKGAAKCIRCNAKFVKRADGTACLACGSGCFECSEGNPNQCSACENGKYLKADTHTCVDGAGEACGAGNYADRTTGKCENCKTGSSSGGAVQGVEGCEACSVNTETGKLRCTVCNGSGSKTLVKVAIDGTTTCVAEAECTTGSMNFLSDSKKECILCDNTTSVTPNDKGRLGCKTCTKSNAPPVCSECLEGFFTKDSGATCTACAKNCLMCNDANADQCTKCSPGFFLKSNKTPGECIPCDSTENGGSEGCGVCSNSGTFECTDCKPNYHKQAGGGSAVTCEKFCEDETACEGTAGACEAIVVQDNGDFLHYCSLCGDPNTFPIDGKCVDNAQGNTCANGVCTQCAAGYFLYMGGCYDVTKTPGNLMCKAAGQEGICTEAASDKYFVVPGVTSNTEQSVLACANPLGTLAVGNAYVGVEDCSQCAAPDARSDGGMAVATCTACGEGRKPNKSGTGCAACSIENCRHCRVDDVCEECSSGFSLEGGKCISTGTSGGNRSGLSTGAIAGIAVAVVVVVGGLVGFLCWWFICRGKA

SEQ ID NO: 336 - protein, 666 aa, Giardia intestinalis
MLFVAFCFVLSTLAATCSVDSQVGNCKKGMCEMVGNTEICAECEAGNVPINGVCTAHNDGKVSSAGCKKKANDSVDASSVKCEQCDVANYFLYKGGCYSKDVAPGNEMCKTVTTNGICAEAADKKNFFAVPGATKTDQSVVWCGDVEGVTLGDGKKYTGVADCATCEKPGQLPASGTKAATCSACKGSKLVKTVGDVTSCVEESDCNSGFFVNTNSGRKCTACADENCDVCGAPEAKKCSKCKTNGEKVYLKKENADPTGVCVNAGDCTAGNTHFADDTIDPANGKTCKLCKDGGLTNCAKCEKQESGLVCKDCTAKFSLGKKSCVDECPPNSKAGLDNICACAEGFEPSSDWSACQPKSSCRTPGCKTCAGEGTDKEVCTACLEGKYLTPTSQCVPDCTVIEGYYNDRTANRCEKCNSNCKTCLATDRDKCTSCPAGRALTYEGDPAHGGTCGDACKVSADGAGCEACGAQIGGTAYCSKCKNTQQAPLNGNCAANARVAFCATVTGGACTKCNEGYFLKDGGCYQTDRQPGKQVCSSAQGGACNQCANGLQAQGGACGECHSTCATCSTADAADKCKKCATGYYKTSDSEGSCKKCSEGLAGCRQCTASANAFVCFEMGDNTSENVNKSGLSTGAIAGIAVAVVVVVGGLVGFLCWWFLCRGKA

SEQ ID NO: 337 - protein, 739 aa, Giardia intestinalis
MFSGFVFVGLIVQLAWTEQVAERAREAQCADNTSNCESCNVLIGDKLYCSKCKADPADHAPVDGVCTDVSSSKGICKQNADGKCTECDGESFMFEGGCYQINQVPGQTMCKTAETGKCTAAPDSRNYFVVPGEERKSTDQSVVLCGDKTGLRLTSGKTYKGVDGCTECDGSALTDQADGTAKCTACGDGKIVKTAKDQATSCVTEQACTDEEGFFVDAGERKCTACADEECAVCAAKEQRKCTQCKTSGTKKYLMKDGESATGTCVDTAGCPATHYIDEEAKSCSTCVSGGTVDCTTCEKGAGGAVLCKTCATGAKTKFGPGKKSCVESCPSNSSEEKTPGTCECVEGYVPDEAGTGCKKSSDPPAAQCSTPGCKTCDKPKAGEEVCTECEGAKALTPTGQCIDKCGDLGGYYEGTNDKKKKACKKCEVANCLLCNREGKCATCKAGFYGEACAACNSACKNCSGPTAADCTECSSGKALKYDTSGAKGTCGAGCTPNASGCEKCELTVEGTTYCSKCKEAGQFPQNGVCSAAAGRAVTCTSQGSGVCNTCANGLLHMNGGCYETAKFPGKSVCKEVAPGGETCQTEAPGYHLDNNALVVCSAGCKTCSSNTVCTACMDGYAKTDKSCTKCAAGCATCQGAAETCDTCSTGYYKSKNACVLCTANNADNTITGVANCASCAPPSGDKGPVLCYLMKDGGSTNKGGLSTGAIAGIVVAVVIVVGGLVGFLCWWFMCRGKA

SEQ ID NO: 338 - protein, 239 aa, Giardia intestinalis
MLLVSLYFILGVFTTTCTGRAKSNCANNKCEMLVTTEICTQCNAGFVPIGGVCTAHGDPTVVAGTGAGCQKAGDTAVDGGSTVCEKCTEANYFLFMGGCYKTGEAPGTLICTAAASGKCSACVENGYVFKNKNSSPTLGTECILCSDDTGSNGNKGVANCATCTAPSAESGTATCKTCMPEFALDGSANACTSNSGTGGNTNRGGLSTGAIAGIAVAVVIVVGGLVGFLCWWFLCRGKA

SEQ ID NO: 339 - protein, 690 aa, Giardia intestinalis
MLLIALCFMLSALAAACRQDGDHVIACAHEKCETVGGAEICTGCKAGGVPIDGFCWPASSPPAALAGCVPGESSGVCTRCSSEGYFLFMGGCYKAGSTSSQTLGDSICETIQDGRCTKCKADGNVFQNKADSPTLGSECILCSDTTGANKNTGVANCLKCTAPGNKEGAATCSECAAGTYKKSDAECAACHSDCETCSGANQNQCTSCRDGKYLKDGNSCVDKVGCTANTYYIDELNVRCIACSTIESCTQCKLGTTGKPECTACDGQKIPRTILDGTSICVTKGYDQCQGTDKEMFMKEDQSACLLCGDATTGSDAKDKGVANCKTCTKASAGAAPVCETCKEGYIKKGDGAGATCASCHENCATCSAETNEAKCTKCKDGFFLAGAGEGKCISCENGNDSGYSGIAGCLSCKAPTTPGPASCERCKIGYMLQGTTCVKACEDETACGGTAGACDAMVIDDQGNTKHYCSYCGESNKFPIDGICTMDKGTNNGCINHFCGSCGAGFFLYMGGCYSVSKAPGNYMCKIVGKEGICTEAANNKYFIVPGAQSTGQSVLACANPLGTLAGGNAYVGVDGCSTCTAPAGRNDGGMAVATCTACGEDKKPNKSGNGCVLCSVKDCKSCKADEKCEECSSGFSLENDKCVSTGASGGNKSGLSTGAIAGIAVAVVVVVGGLVGFLCWWFICRGKA

SEQ ID NO: 340 - protein, 722 aa, Giardia intestinalis
MYCGACGIEGDVLINGVCVAAGAESSGNTCDKGVCTACTAGYFFHYGSCYKFGESPGSIVCPNQSDTTGSVCGSCGPKFVKNPNAGSSATSCLACYGLDGTLFCDECRISVLTGEGAKPTLCTRCKSGHVPIDGRCVSAYSATAALAGCSDVSTRGLCETCSSGYMLFYGSCYSVDGPIAQAICATENQIYLGGRVFCRQCAQTDHYPIDGLCIADKGSHTCADGVCTACDTSKTTPLDNSKVFLFYGGCYNASSAIGSLICLDASNGACSTCNTTGTSNVIANPSSADGQPKCLACWDEAATGVANCGGCAATTEGDSKIVCSKCTDSTEPKDNACPQALPPATPEGCAVQGCQACSKDSATACDACLPPLVMKEDRTKCFGSCLALGPGYYNNSGTCSPCMEHCLLCADGATCSQCDEGYYLALSSTNPPQGTCRACAAGCSACNDGTDTGCTACLPGYYIASESKANRAAKCVLCNTTEGGYTGIPNCVACFSTVGNNGAKNVVCSQCEEGYVKKHDGSQTICEPPTPECNVAMCSVCADNSPDRCEHCTTGAYLCPRTAACTKDCASCGGSMYPDGDLGECQPCDIPSCRVCATGLKCKSCAENAVPISPDVYHTACMGCSDTGGMDGWVGLAGCTTCELTDRGGGSVNCLDPGYYRRGGLGGGAIAAIVIAVLLALAVAGFLVWWFVFRKGRSSRRGGAKYTSLVRGESYDYRQSLI

SEQ ID NO: 341 - protein, 636 aa, Giardia intestinalis
MLLIAFYFVLNALAANCKGDGSQHTVCAEGKCDMIGNIEVCTQCKTSGNVPIDGVCKAVAEAANKCTKDNDNPVDNQDTTCGKCTNAYFMYKGGCYGTTSAPGNKMCKTAADGVCTAAVDTKEYTTIPTADRDATKQSVIPCGSIEEVTVKENKKYKGVAHCTKCREPAKNNSDTAVAAVCETCEDGFFDAACTACHDSCKTCEAAGEDKCKSCKDGYFLGATSNAAGKCIQCNSKTESNWPGVDNCAKCTSSNTQNTPATCTECMAEFYLKPAVDVTPPSCVAETGCGEGFFPATVDKVKKCVACNAKDNGGIEDCKKCSFKTSSANAAPILACTECNTKWLSPVGDACLEDCPAGTHPHDGQVCPSCHNTCAECSGNADATSCTACYPGFVLKRGENGNMGTCIPECTGKYVENCEANQCTAVVGGSKYCSKCKTGFVPVDGICVSIASRAVIGCTPGNGVCTACTDSYFLQSGGCYRSTAFPGNKLCTLANNGKCTRCANGQTADNSSGSCPACDSTCKTCTAKEDPNACSACFPGYYKSGTKCVACDKSDGTINGVENCSSCKEPTGPSGTVTCYVKNDGTSGGGDSGSGGGSTNKSGLSTGAIAGIAVAAIVVVGGLVGFLCWWFICRGKA

SEQ ID NO: 342 - protein, 523 aa, Giardia intestinalis
MLLEITLLCVVALSRQCASLVLECIECDESTGKKCIRCDPKSDTPFLMETPPGNEKNPCVQDCTQTPGYYNDASDAQNKKCKKCAGNQKPNTAGDKCFSCSDENCERCDSDNNCARCSNGESPGDKKCPVATNGCHSSCDKCTSNAMTNQTNQCTSCKEGLYLKPNSVDGQSGVCLTAGECTSYGTHFTKEKAGDSKRMCLSCSDVTHGIVGCKKCFSKTLSGKTELTVVCSECTGLWLSPLGDACLDGCPDGTYSGRNNDNIGICAPCHNSCASCEASDAETSCMTCYPGAVLSHIDDDTGKCIPECTGGFTAHCKAGGCSLNVGGSKYCDQCEDGYAPIDGVCTEVSSTARDASGCKASSGKCTTCSGSYALLSGGCYDTNRVPGSSVCEKADGNGNCTTCANGQKYTDGNCPSCSEGCEQCTTNTNQCETCYPGYYRTGTGKCFKCAANGDNGIKGVPNCVSCAPPASGSGPVTCYLKTDGTNRRSLSTGVIAGVSILAVIVVGGLVGFLCWWLLHKKKA

SEQ ID NO: 343 - protein, 624 aa, Giardia intestinalis
MLFIVFYFVLNTIAATCTGAQASCKPDKCEALGDSEICTECKEQGNVPINGVCKTHDSSETNTAGCKNGSNSAPTTEVKCTKCTGDKYFLFMGGCYNQASLPGSTICTATADGECTSCAVVNWLFENPTDPLTTPGTKCILCSDTIGDGTTKGIAHCATCTAPDAKGIATCNICGNGYYKDDGGACQLCTSPCATCSGAGTDKCTSCKESGGNEYLRIKDSQSRTGECVAQSACTGESTHFLVTDIKTCYPCGSVNDGGIEDCLKCTANTVSDSIKGITVKCSACTSNTNKPNVAGTKCVACTIEECARCNDDSTCAECTPSNYLTPTNECTDDCEKLSNYYSDDNKHTCQSCDPGCTLCLTTDKTKCTACPAGKMLKYDDDTHPDRGGSCVDECKEGTNGCEVCGAIIKNTKYCSKCKTATEVPVNGVCTADNTRAPACLNKDNQGSCTTCANGYFRQDGGCYKTDRQPGMQVCSEATGGNGLCVTCTNTLPANNGLCPTCPDGCAKCTGAPSSRQCSTCYSGYYLSGTVCVRCTESSNNGNAITGVADCLSCKAPNGAGTVTCYVKKDGSSDGGNDNTDGNVNQSGGGLSTGAIAGISVAAIVVVGGLVGFLCWWFICRGKA

SEQ ID NO: 344 - protein, 546 aa, Giardia intestinalis
MCAMWLAASGRCFHCLPNRYSSFKLAASILRRAMLYLTALVLIGLASVDSLAPKQCNGAGATKCASVGDNCLDIKNNGVTKEVCTKCEDTHVPIEGACQEKGAQADKCTPQDPPDGTCKACLGSHYLYAGGCYAACPDGTYADAGVCKPCGASCVKCEKKDAGTRCTKCEDTHVPIEGACQEKGAQADKCTPQDPPDGTCKACKGGSYLYKGGCYASCPQGTPNPETNTCDGVPAPDCNIPNCEACSEDKRTCTRCQTRYFLTPEKNACLGACPAGSYATGQACTPCDPSCAECSGAGAPKCTACPAGKMLRYADEGKPTDGTCVEGCVEGPECETCGLTIGGTKYCSKCKGSSVPLNGVCTSNAARAQFCTTAADGACTVCAAGYFIQGGGCYETTRQPGEQICALTDNKGKCQTCANGLGPDGAGTCPSCNPTCKTCSAANTASTCTTCATGYYKTTQEGVCTSCESDSNGVTGVRNCLNCAPPSTGSGSVLCYLMKGGDSTGGSTNRSGLSTGAIAGIAVAAIVVVGGLVGFLCWWFLCRGKA

SEQ ID NO: 345 - protein, 405 aa, Giardia intestinalis
MLLTSFCFVLSALAANACTDDQLNTCDTNQCETLGTTQICIQCKTAGHVPINGVCKQQGDEVSNAGCKNNAGAEISTEKTCGQCDGAYFLYKGGCYGTNNEIGQKLCTEATGGICTAAATGYFVPPNAQKTDQSVISCFEETQLTVNTKNFKGVPKCLICDPPTTTTANPNLPTCTVCEDGTFVDSDGAVCTQCSDVDCAKCNDGANKCTKCKTKYLKITDANTGVSECVDADTCKAGNSYYQDDTGTIENGKLCRKCDESVTGCNKCTSTPISDVRTTTVIKCTECTSPDANKPNVAGTGCFTCSIENCSNCSENGICEKCGSSKKVSPGKKSCIEKCPENSTDTESVCVCNSGYGPDSAGTGCVTVSTNLSTGAIAGISVAAIVVVGGLVGFLCWWFICRGKA

SEQ ID NO: 346 - protein, 727 aa, Giardia intestinalis
MFSGFVFVGLIVQLAWGACTQEEGDDKCKTCGVTIGQEKYCSECNGANYAPVNGVCTDVSGQKEVCKTNAAGKCTGCAGESFMYKDGCYQTSQAPGQTMCKTAAGGKCTEAVESKAYFIPPGADDAHDSVVGCGDVDGVTLTGDKKYTGVAGCTTCDGTQLQVGASGATKCTACGDGKIVKTAKDQATSCVTEQACTDEEGFFVDAGERKCTACADEECAVCAAKEQKKCTRCKTSGTKKYLMKDGGSATGTCVDTAGCPATHYIDEEAKSCSTCVSGGTVDCTTCEKGAGGAVLCKTCATGAKTKFGPGKKSCVESCPSNSSEEKTPGTCECVEGYVPDEAGTGCKKSSDPPAAQCSTPGCKTCDKPKAGEEVCTECEGAKALTPTGQCIEKCGDLGGYYEGTNDKKKKACKKCEVANCLLCNQEGKCAACKAGFYGEACAACNSACKNCSGPTAADCTECSSGKALKYDTTGAKGTCEAGCKPNASGCEKCELTVEGTTYCSKCKEAGQFPQNGVCSAAAGRAVTCTSQGSGVCNTCANGLLHMNGGCYETAKFPGKSVCKEVAPGGDTCQTEAPGYHLDNNALVVCSAGCKTCSSNTVCTACMDGYAKTGNSCTKCAAGCATCQGAAATCDTCSTGYYKSKNACLLCTANNADNTITGVANCASCAPPSGDKGPVLCYLMKDGGSTNKGGLSTGAIAGIVVAVVIVVGGLVGFLCWWFMCRGKA

SEQ ID NO: 347 - protein, 614 aa, Giardia intestinalis
MLSAPWIASSMFDRIFFGIIILQATQAAETCPKVSDESSQPGTCKKDNCNVWIGGSSFCSQCSTAAEYLINGKCIDTNTESACENTPDNGVCTSCKAGFFLHRGGCYKIGTEPGNLVCEDMQASQTQGTCDVCRSGYFRNPFNNLDKTKESCIACNQTTAIDGSTGVANCQVCNPLETPGTVVCALCEDGKFGETCATDCNADCKSCSAGTANDCTSCNGGKYLKVANEQATSGQCVEKVTCTSTYFPITADEKCYPCNTVSRGGVDGCTACSKPGDSVICTACTGIKKPNSAGTHCFECPTEGCEKCSADNACEKCSGDKKLTPTKECVDKCEELGGYFDGSDNNCEKCSPTCKTCTKAANQCSSCPAKKVLEYNSESNLEYGGTCIDECTVGANGCAECGATIGEAKYCSKCSDASKAPLNGNCTVNARASASCTQIENGVCKKCTADYFLFEGGCYQTTRQPGMQICSAIDGATGLCQTCANGLAADKGDCSAQKCHITCKICSIANDPSQCKRCAAGYYKQSDEATAGKCDPCSQGNDGCTLCKYSTTFICLSTDSLDDDGTDTTPVDPPSSNKSGLSTGAIAGISVAAIVVVGGLVGFLCWWFICRGKA

SEQ ID NO: 348 - protein, 1335 aa, Giardia intestinalis
MLVLPVGLLVLRAVHTKVFSPVGITASSIKCYHSLKLGEDTVCTDCGTLNTVPINGVCVPDDPNICIILQGYNTKCGSCTSDYMLFEDGCYDLNGKYASLICTPENRYVLEGTTYCSRCAYLDYVPVNGICDSASLFDTCANNVCTKCGFSSFLFNGGCVSKSSSLGKLVCAGTVSDGKCTQCADGFSADATGMCVPCESPNCSSCPDDKNTCSSCKEGFFLDSTSVCVLCKHHCAVCSSEYDCTKCRANAQELTIGSEKVCIGCGDTSSQHGGYLGIEFCAQCTLPSIPGPVQCHKCFQNYYSLTDSTTGFVSCYAACPIGTYGDTYSMSCKSCSANCRICEGSYGCTECVPGYYLDFMSCTPCKIPGCSKCTSNYAGDICEMCLPETPYMNLAGTECVASCPVGSKPDTGTPTKCICDFGYGLAESKNACVKCSDKYCKLCTENSNVCTECFYGNKADETAECPPPVCADNCISCTQAGHNFCDVCQEGFRLTADLKCARCSDENCLTCADDVAVCTRCQYGFRISSSGTCIQCGLGCKVCNESMCIECSNAAHSIGIDGISCDAECPSHSTPVSDDNTSRCVCNDGYIPELEARLCVEEPKICPLGCICETAPICNGCADGFFEKDPNRIDSGRCHSCALTTDSQGGQTTTGCKTCRLVEDTVLCNECLPNYKLYDSNGVIHCMKTCPSGTHDTGSHCVKCLTNNCMQCNTDKAACEMCVREYYLWENECISCNSLECAECGLSNICTKCMSTKKCNACAIPHCRTCNALGKCTVCEKGFYGPLCQPCGDNCLTCSLENFGVCLECQPGSIISMGNCYNMCTEGEGSGKCAVGSCNMQTGACMRCSVPSEFPINGLCTSDPHGNDCLAGRCVGCTAGYFFYGDGCYSLTAAPGNGICMASLRGYCTACHDGYSLQGNECVPCKVSGCAKCASDPTICELCTIEAYVVDPAGSSCVPECAVPNFGVNSSSKHCVLCTDQNCLECINIADTCSRCKIGYHLVEGTCVACHSTCLTCSGPGESDCLTCIRGKVHSAGTGPSTCISECIENSRNCLQCNAIISGTAYCSQCAVGHYPINGDCRATARDLICLNGEDGICTHCAPGYFLYSGGCYQSERLPGSYVCAQSATGEGVGICNKCQLGYMPLSGSCTPCESINCQVCEYSVDICTVCSDGYYGDNCVQCPKACASCKSNLQCTRCAEGYFAAIDYEIFDPSHCIACSDEEGKDGYIGKQGCLSCIGPAIPGPVLCLSEAGSYAPVAPLASSTRLPLIIGLSVTVVVLLLVALGILLWKLLSAKKLNRTRCVHLPGSTTELLAGASGTGQSMIFDSINLSIN

SEQ ID NO: 349 - protein, 583 aa, Giardia intestinalis
MCIAIGADNVCTDCGKTGEVPINGKCVAFGTASDKCKKVDDKALDETDTTCGKCEGTTFMYKGGCYETSSSSGAKMCKEAASGICTKTADVKNYFVPPGADATHDSVVWCGDAEGVTLGNSKKYTGVNGCTTCNQPEQATDAPKAAICTACGGGKLVKTAKDQTTSCVTEEECANEEGFFVNANSERKCSVCADTCKTCKTDAVGCTSCTGATPYLKKDDGSETGECVNRGNCPATHYVDEEAKTCTTCTSGGVKDCKTCVKSDGGAVCDTCDGEKPLFGLNKKSCVAQCPENSSNQGGTCACKEGFRPDAESTGCQPAGKCATPGCEACDNGGTENEVCTECSSTNYLTPTAQCVRDCAAISGYYGDSADKRCRKCSPECAECVGPANNQCSACPAGRMLQYTDANTPAYGGACVDQCSAGATGEGCEVCGARIGGTDYCSKCTGAGRVSINGVCSENGRREAACSSLQEGVCRACGAGYFLFSGGCYETTRQPGKQVCAQADGGQCRTCANGLGAQDGDCSKSACHPTCATCTAASQADKCSACPAGYYLDAGKACASCTEASGAIQGVANCASCAAPSGN

SEQ ID NO: 350 - protein, 539 aa, Giardia intestinalis
MLVGIISVLAVILADACSPVKPGCAECDSTGKACTKCDAGGATPYLKKADPSDPTGTCVTVLGCAYDNEHYADNSISSSGTKECKVCNGGKRPDTAGTKCVTCSDANCKRCDQDNVCARCNTGEPPENGACPVTEKGCHSSCDGCTSNAMTNQADKCTGCKGDNYLIVVASNEKSGVCVSAAACTFDGLYFTKEVTDSNGSKKMCLPCNDATHGIADCKKCILKTPSAQAEPTLTCSDCDTKWLSPLGDACLDGCPDGTYSGRNNDNIGICAPCHNSCASCGGTNAETSCTSCYPGAVLSRTNGDTGKCIPECTGGFTAHCKAGGCSLNVGGSKYCDQCEDGYAPIDGVCTEVSSTARDASGCKASGGKCTTCSGSYALLSGGCYDTNRVPGNSVCEMASAGQCTMCVSTNKDPKGSPCPTCSEGCEQCAADTNQCEICYPGYYRTGTGKCFKCAANGDNGIKGVPNCVSCAPPAGGSGSVTCYVKMDGTSGGDDGNGGSVNRSGLSTGAIAGIAVAVVIVVGGLVGFLCWWFLCRGKA

SEQ ID NO: 351 - protein, 803 aa, Giardia intestinalis
MPLSSLFLMLIYLLGGISSEETSIYRNGFGTLCREAVQNCLYNKCLQKSSNTFLCVECESGFVPINGKCVSTTIETVQKAGCVTLSASGWCTKCGQDYFLFYGGCYEWTGDWKISICDRAENGVCKDCGKGSITSRALVFTNPNMGSPERCIYCGDTIGFGGYSGISGCLFCTPSRLKQSTVADCYACLDQQNTCPYDHQCRRVNEGAQRGTCGYCLETHLWSAYSCYAINTPAGNNICLPKNVMKMYKRSLCTHCTNSSEVPYNGLCVPEAGYRNICTKNPNTGVCTKCSDRGRTQHYLFYGGCYIHILDPICQKVENNVCVQCKSDNQEVFTKENGCWRCGDTQHGGIEGCQRCEMKDETLQCLECNDLYLSLDKKNCLEKCPDGQIGTFSPSTSIHTCTCDNGFYLEDENCIKCVIDNCAKCDKSACNECMYGYALFNNQCKETRCQDPNCEICESKTLCIKCISTHSLDQNGLCVKDCLSSAGYYKDIVGGVSRCVKCTLDGCATCESADKCKTCKNEFYLESQEGCKPCSSECATCSSSTTGDCTSCPAKRRLQYSDDTKGSCVSQCVKDNSCAECGLTIDGTSYCSQCVKSTEYPRNGVCTSTNSRATGITCTTVVDGQCIVCGSSSFRLNGGCYTSTLLPGKAVCTTESNGWCDSTVAGYGITYNGTLRTCPENCKVCTDGSCSSCNRGFYPENGVCNACPEGCATCPHGRACFDCLAGYYFSENICKACHKAIPNCNLCMVPEDAVSPVCLDHSNTPRKSALSAKAISGIAIGAVVVVGTVAAVLVWLFVFRKKN

SEQ ID NO: 352 - protein, 689 aa, Giardia intestinalis
MLLIALCFMLSALAEGCQEHGDHVVTCQVNKCEIVNSIEICTECKAGGVPIDGFCWPASSPPAALAGCVPGASSGVCTRCSSEGYFLFMGGCYKAGSTSSQTLGDSICETIQDGRCTKCKADGNVFQNKADSPALGSECILCSDTTGANKNTGVANCLKCTAPDSKEGAATCSECAAGTYKSPNGDTCTACDSPCKTCTAAGINKCTSCIAEYYLKDENTCVNSGGCGGNSYADELTMTCKACTTVHEQCTACSFDKAKGKPKCTDCGSNNTPRTSLDGTSTCVAKTIEGCQGAGTPTAKEVFMKQDQTCALCNDNSVSTPGSQGTLNCKTCTKSVSGTNPVCDECLEGYMKNSGNTCDACHSSCATCSLQDDKTKCQTCKTGFFLKGEAPNECILCNDTTNGGREGCSVCSNDSGFKCTDCKTNYRKKGSSSDDYTCEKICEDETACGGTAGACDATVVDDQGNTKHYCSYCGEDNKFPIDGICTTEKGTNTCISHTCGSCAAGFFLYMGGCYDVSKAPGNYMCKIVGKEGICTEAANNKYFVVPGATSTEQSVLACANPLGTLAGGNAYVGVDGCSQCAAPDARSDGGMAVATCTACGEGKKPSKNGNGCVLCSVKDCKSCKADEKCEECSSGFSLENDKCVSAGASGGNKSGLSTGAIAGIAVAAIVVVGGLVGFLCWWFICRGKA

SEQ ID NO: 353 - protein, 710 aa, Giardia intestinalis
MLLVALLFVSSTLAADCQPDGDHAATCQTGRCEAVGSSEICTQCRAGGAPIDGFCRPVGSPQVIAAGCTGPEGAPLDSTAATYGTCGGADHFLFMGGCYSQKNRMEGTICTKTVEGKCTTCKVDGRYLFQNPANPATPGNECVLCSDIRGDGTTKGVENCAECTKPNAAGVATCSKCKAGYAKKENACVQCGEGCSECSADTPAQCTACFDGKYLSTDKCVDANRCGDGNYADPKTNECKACITAECATCIYNTIIDREQCIVCNNDPIKMVKIEANGETTCVDKATCATDNTPGSHFLSTNSQKCILCSDNSDADNQGIDGCSTCKKKTPTDALVCTECLAGYIKKGSDSVTCEPCGANCATCTQIGDDQCTACKPGYFLKSGRSPSECIPCDGEGGTEGCGICSNDSNTFKCTDCKPNYHKRAGGGSAVTCEKFCEDSTACGGGTAGTCGAIVVQDTGDFLHYCSLCGDPNTFPINGICTGTKGDNTCANGVCTQCAAGYFLYMGGCYSAANTPGNLMCKTAEGGKCTAPNENNKYFLVPGAASNQQSIMACENPLGTAVGEKAYVGVEGCDTCTAPAPLTEAGLRPARCTACNTGSGKPNLAGSGCFLCTVGGCSHCSANGVCEACMNKEQRPNTAGTQCISCSIDGCTRCSAENKCDQCGDGYRLEGEACIATKPSGGNRSGLSTGAIAGIAVAVVVVVGGLVGFL

SEQ ID NO: 354 - protein, 590 aa, Giardia intestinalis
MGGCFKKGSTSSQTLGDSICETAQDGRCTKCKADGNVFQNKADSPALGSECILCSDTTGANENKGVDKCTKCTAPGGKTGTATCTECAAGSFVSNQACTPCDSPCATCETAAGRCTSCEIGKYLKENQCVEKRECTGDHYPDDTTMTCVACNTLGGCTACEIDPVTARPKCTNCGSNKQKSEPNGTITCVEEAKCAEDKVHFLNSDKSKCMLCSDATDSSTPGNKGIDHCNECAKTGDNTNPTCSGCLEGYIKNGDGSMCESCGSNCATCSEKTANDKCLTCKAGFFLVVAGSSKTCVPCNDTGNGGIDGCAECIKEPAGSLKCTQCKPDHTLTGSGCQKSCEDTTACGGTAGACDAMVIDDQGNEKHYCSYCGDKDKFPIDGICKTNSDKGANICTGHTCGSCAAGFFLYMGGCYDVSKAPGNLMCTAAPAGICTEAANNRYFIVPGATSTEQSVLACANPLGTLAGGNAYVGVDGCSTCTAPAGRNDGGMAVATCTACGEGKKPSKSGNGCVLCSVKDCKSCKADEKCEECSSGFSLENDKCVSTGASGGNKSGLSTGAIAGIAVAAIVVVGGLVGFLCWWFICRGKA

SEQ ID NO: 355 - protein, 641 aa, Giardia intestinalis
MLLIAFYLLLSVLAAACSGSAQTNCVENECTQVGATVICTQCQTGFVPINGDCKSKTDSATNCKKADDSEADQICGKCMGANFFLYKGGCYEKAKAPGNIICSDEASGGTDGICTSCNTANGFFPNLAPAASTKQSCIACNETANINGLTGVSGCVACTNIGPAGQTDPKPATCTKCESTTLKYLKTVDGVTTCVTENDCDKDNQKKFFIVDNAREGGKCISCGNKDGAADASNGIWKGVEGCVKCTKSVAAGSATCTECAVDLYLKTDSGATSCVNEAVCKESNTHFPTTNSDKKICVTCDTTANGGIDDCEKCTLKTVSIKTSPIITCSKCKNRWLSPLGDACLEKCPAGTYSERGTDNVGVCAPCHNTCAECDGNAEATSCRACYPGFVLSYGSDKLKGTCIQECTGKYAENCEANQCTAVVGGSKYCSKCKTGYVPVDGICVSATARAIEGCNPGNDGTCTTCKEAYFKESGGCYRSTAFPGNELCSVASDGKCTTCANGQTADKTSGSCPACDSTCKTCTEANKPDKCSTCPPGRYFDSTAKACKLCTEDSNDGKIKGVENCLSCKEPANSPGTVICYVKKDGTSGGGGDSGSGGGSTNKSGLSTGAIAGIAVAAIVVVGGLVGFLCWWFICRGKA

SEQ ID NO: 356 - protein, 393 aa, Giardia intestinalis
MLLVAFYLILGTLGARCKGHQHSRCAIGKCRVVNGNEICTECRATEEKPINGICKSEGNSVVTTNTRHGPQCTEEKCSTPNCKDCTNPKADNEACTECNNGNCLTPTSQCVLACETLGAYYADSNNVCQPCDPSCASCLGTDKTKCTACPAGKALKYTNDEQPEQGGACVDECRADADGCAECGATIGGTKYCSRCGASSDYPVNGVCRTTPGRASTAACKTPDNKGGCTVCAANYFLQNGGCYKTDRQPGVQVCITVTPDGKCETCANSRPADGTGACPSCDPTCKTCTDASDASMCSSCFVGYYQVGTKCVKCDVTDSGITGVSSCLSCAPPPGNTGPVLCYLMKDDGTGGSVNKSGLSTGAIAGISVAVVIVIGGLVGFLCWWFLCRGKA

SEQ ID NO: 357 - protein, 576 aa, Giardia intestinalis
MLCVGVTLAVALGMACSPGGDYAVTCANDKCELVDGIEVCTECKAGGVPIDGFCWPVSSPQVITAGCTKEDGASLDDTATTCGTCSGAGHFLFMGGCYRRRPGAIMQTPDPVLCPEAASGSGNCKTGKCFTIEGFDKLSYCSQCADNTEVPLNGACERPEETQACIQMSGGICTQCAKQTFMYKGGCYPKITIPGVKMCKEAADGVCTSPAPGYFVLPADDRDASHQSVVSCGDSEGALGKSAKIYKGVKGCAECTLSDSATTATCNKCSDKNLSPLKDECMENCPAGTYLDSTGSDGNVCRLCHESCASCEANNASTSCKACYSGYVLNRDAGNKGTCIPECTGKYAENCEANQCTAVVGGPKYCSKCKAGFVPVNGICAPTTPAGREATGCTPSENNDGTCKACTTTYFLESGGCYKAGTFPGNTLCTTANDGKCQACANGQKYTSEGSCPSCSDGCASCTGTPTARTQECQTCFAGYYFDGVAKVCKKCSETSGTITGVKNCISCAPPISGSGPVICYVKKDGTSGGDSGTGGSTNKGGLSTGAIAGIAVAVVIVVGGLVGFLCWWFICRGKA

SEQ ID NO: 358 - protein, 1073 aa, Giardia intestinalis
MLCVGVTLAVTLGMACSPSEGRTMTCKSGNCELVGDAEICTQCKAGGVPIDGFCWPVGSPQVITAGCTGLEGAPLTSSDGVCRKCSGTDHFLFMGGCYNKGTWPGSEICTAVDKGICTTCNTQDTYLFQNPANPATPGNECVLCSDVTSRDGVVGVASCYTCTAPGGGSGAATCTTCQPGYYEEGGKCKECVAGCIDCTGIDQCTACEDGKYLKTNTCVDASGCDETEYADKKTWSCKACSDIEGCTECTYNDTTGKPKCTNCNGKLIKTTVDGTTTCVDANGCAQSNQAGTHFLSNDNRKCIPCGDDSESLEADKGTPGCKTCTKNGAKPTCSECLDGYYNSANSGTATCEACPGKNCATCDKSTKDKCKTCTPGFFLKDSASGECIPCDDTKNGGSEGCSVCSNNSGFECTDCKPNYYKRTRGRSAVTCEKFCEDSAACGGTAGTCGAIVVQDTGDFLHYCSLCGDPNTFPINGICTGTKGDNTCANGVCTQCAAGYFLYMGGCYSAASAPGNLMCKTAEGGKCTAPNENNKYFLVPGAASNQQSVMACENPLGTAVGEKAYVGVEGCDTCTAPAPLTEAGMRPARCTACNLGSGKPNLAGSGCFKCNIPTCSHCSANGVCEACTSKEQRPNTDGTKCISCNIDGCTRCSAENKCDQCGDGYRLEGETCVQIQPSACKTLGNAGCATCDPNGGDEICLTCTKESDFLQLNKKSCKASCDGDGEIADPTSTPKVCKCDAEKGYQLQDDACVQTQPSACQTENCQECTNRGKENEVCTECISTHYLTPTNQCVKDCTTISGYYGDADKKCKRCHDACAECVGAANNQCSACPAGRALTYADDNHPDNGGTCGDACTVDENGCKACGAKIGGTDYCSKCSADSQAPLNGVCTANARAQFCTQVTEGSCTSCNDGYFLRDGGCYETTKQPGKQVCTQANGGQCQTCANGLETQDGDCSKSACHPTCATCTAASQADKCSTCLAGYYLDASRACTLCTETSGAIQGVAGCVSCTAPSGNQGPVLCYLLKGGDSTGGSTNRSGLSTGAIAGIAVAVVIVAGGLVGFLCWWFLCRGRA

SEQ ID NO: 359 - protein, 430 aa, Giardia intestinalis
MQPISNNIGVALCFECSSRSLYPIDYQCQAKGLHNCINGYCTSCYKTHLFHKYGCYSRYSSTGLAVCAEANQYELDNVTICTECTNASYAPRNGACTLVREDAPIGGVFFDCTKDPARGLCTACSSSTPSFLFYGGCYDKNSYIGPKLCPKIGSNGCEEWNSQYPFIFPKDTAKKDHYLCGDAANGGVAGCATCSYSNNAVTCTRCSTGYLGVDGRSCGKDCSGSTQGACSEVVEESSSVKILSCRCVCKPTFYNNSGTCASCTDSCAVCKDGTPTGCQQCSPGKILNFSIASSESADCINQCVVGSECAECGLAIDGSKYCTRCKDSSMYPFNGVCILDAKKDAYCTAKANGVCTTCSSSAFLMNGGAIQHHTIQAIPSVIQSRVVSAQQPGRGTGYQMMESCSPAPPSAWSARPLAPAAAPGAPLGSS

SEQ ID NO: 360 - protein, 678 aa, Giardia intestinalis
MLFAVLYLALGTLAAACQPDGDHAVTCQTDKCETVDSTEICTGCKAGGVPIDGFCWPASSPPAALAGCVPGESSGVCTRCSSEGYFLFMGGCYKAGSTSSQTLGDSICETIQDGRCTKCKADGNVFQNKADSPALGSECILCSDTTGANKNTGVANCLKCTAPDSKEGAATCSECAAGSYKSGNTCLACVKDCISCTADSQCTACKPGTYLKDNTCGESTRCAGTEYADKNTWSCKACSEIKGCTKCTYNENLQKPVCSSCTTGGKTIIKVKLDGTTMCVDAAGCATDNVDGSHFLNQAKDKCLLCSDDKTDASNPPNKGLKDCRTCKKENAGANPVCSECLPGFYLDGTCKPCGANCATCDRSAKDTCLTCKAGFFLKSSSPGECVACNSIENKGLEGCSACSNSGGFKCTDCKVNYKRQSKGEAPDDFICTKVCEDETACGGTAGACDAVVIDDAGKELHYCSFCGDSSKYPIDGRCNSAKGSNTCDNGVCTRCGGDYFLYMGGCYKVDQQPGNYMCSNAAAGICSAANVNNRFFAIPNAQAAQQSVLACGNPVGTAVADKAYVGVEGCSQCTPPTDPAANGMMVATCTACEAPKKPTGNGVGCAVCSDANCRHCRVDGVCEECSSGFSLEGGKCVSTGGPNLSTGAIAGISVAAIVVVGGLVGFLCWWFICRGKA

SEQ ID NO: 361 - protein, 726 aa, Giardia intestinalis
MITSLHTSLHTSLVLILATVITRASIVAGCASDSDCGGVSDSCTITINDLKYCSKCATEQVPINGVCVSKTDAQGNVCSATGCTKCTKGYFLHYGSCFNISIDSPGSLVCDFVDDETEQLADGYCTQCNQNGYTDNPKKSSTAQSCIACFESDGAAGCNLCTAVPDDSSTGGFVLICHGCADKDKVAIDNKCVPIGGVEDALSGCVHSMSSGYTYCNRCGAGFLQFASTCLLANGKYAPKICEVSNQIHVADTICCKQCKNTDLAIIDGDCSDFSFMCTCNGGQCTQCADKKFVYHYGGCYHVYSTLARSICSGEVDVGGRCLQCNTSAASGLFTNPIANEMQACVSCSDTTRQGIANCVECSYAQSKLTCTKCSDGSVPQNNQCSAVTPPGPPEGGCNILACKTCNTTDTTRCAVCHMRTYLALDNKTCVSNCSTQDSGDNHYYGNSATGACEKCHSSCKTCVGPGENQCTDCTPEHYVPGSVGNCISCSSTQPNSAFTGIPNCVRCHKGGYTMTELKCSACVTGMVPDFNQVKCISSTVCSTANCELCQSSPSTCDRCQESFFLTSDGACVSDCTILGPYVGNTQTRRCIHCGEGCISCNSDLHCTSCQSTYAIVDSRYCFKCDSTDSSSLITGISNCIKCKAPSIGHGSVHCLEYNSQPQNEAGSRSNATGITIGVTVAILVIAGLVGFLVWWFVCKKKTNKVSAPPKLSGNSSIIGSRIGLM

SEQ ID NO: 362 - protein, 1615 aa, Giardia intestinalis
MLKVLLVLAVCLAAPCGNTGYECGDHGTCMLVGEVYRCVCAPGWTGYDCSRCSRGFVNLVENCIPPSCIEDGLECGGRGTCLYLKSKDAWECGTCPVGFYQYSGRCVSSYCYGDEEASGVTTERPCSSQGICIFNGASEADRVKPSMYICSCNLIHTGSQCQNCDPQFGKIDPFLRTCVAKSCYDGEDTEPCQGRGECVENAQLHPFTGELTTGYICRCGYPYLLVGTAKCLPLNCVSNQAGTATECGTGGVCEENGGQFSCRCRSGFVQLTDGHCTAPACRPSDGALACSDIGACISGGEDPTDASTYYCQCPISYASGSYCEVCDNQRGTTVDGKCVAKSCVVDNTVCSGNGECVSEGLFAYYCKCHEGYEAHGTNVCAEPGCWDPIVNRTCSGAGQCTSNGCQCNSGFALRSLRCIPTRLISSGWICSGNGTATVSSSDVDASKPENWVCQCDGVVKGELCNECNHERRPHAAYMINGVCTAAACVSDPMASTPVICNGVQGATCKQYGVDVDSIFYCKTPDKSEYLVAYNSSLVVHRGCTYPSQTKYPLNLYCGLLDGRTMDIDEPGAPQCLSTITSSCSCEDPFNFVAVEDTIRNEFGDVQYRTSCIHKACLNPDLKGTTDKQVLQDPSSYCNGLGDCLQDEHGNYECVCGAGSTSFKNTCVSNACLTQDSNTGATVMCGGTGTCAIGTYGHWECFCEYPYFGSGASCYPIGCGYHNPLDCTTVLCGGEGRGTCVANETHPELATCACNRGFTLISSNYCAPSACTAYGADRDDVEPNLSYICSGIGECFYNPVTGSYGCHCGEGYYATGPYCTLPQCLVIIDATGVLPGYIGDLYLECGFAGAGTCSSDGCTCNNGYVKTASLSMCVHAGCIDENNIYCGGDHHAACVDKGDGTGFSCVCTAQYVNVDGACAPKMCVTKDVNGKDVICGGRGHCIQMWTGYMCACDNGGPAVVFEGSYTCPHPDCYEQVGEGLVICSNQGSCKETANSGVCICNNGYSLVGKSQCIISECVQTDGNGVTSICGGGQCLSTNDIYSCACANGFSNVDGRCVHSNCIDTYEGEQIECSGFGKCTAVDSSYKCVCSIGYSPGTEPNRCFSVACLSVIGDKNYECGGHGKCAYSEEQEEFFCTCESGYKNINDDSAGYSVMYLCVASACTTTSGAGQTVCSGGGSCDPTSGLCVCDEGHTGDTCADCADGYIRPPEEYIFRQCMKTTCADSTCGGAGLCVPSLLYNQMVCSCADHHTPLNGRCVPCAIDNCETCDVSQLGRICSVCQDGTYLSDDQTQCLPCHADCRTCQGPRNTQCLSCTEGKVHSLNGMGESGCKEECKVNVDGCKSCGAVISKTKYCSQCQSQTSVPVNGECKSQATRASECSRYSKGACLACADGYFLYEGGCYETAKLPGRDVCSMASGGSCSYCKIGYSKVSGVCTACKDENCATCSTMAVCDNCKSGWSLVDGKCVSCAAECGSCKQGSPSMCESCKDEYFASFSFSGDVSGPCRPCSDTTPKDGVVGVPGCRYCTLPLTSGTNENPVSVICLTTESADKKMSTGTIAGITIVILLIVGGAVAGVLVWFFLFKNRKGPIRKSPRKRFHPDETSTSLLSQDYGSSML

SEQ ID NO: 363 - protein, 750 aa, Giardia intestinalis
MLLVALYFAMSTLAADCQPDGDHAAICKSGSCEMVSGAEICTQCKAGGVPIDGFCWPVNSPQVITAGCTGPEGTLLDSTATTCGTCGGADHFLFMGGCYSQKNRIGGTICTKAVEGKCTTCKVDSKYLFQNPANPATPGNECVLCSDIRGDGTTKGVENCAECTKPNAAGAATCSKCKAGYAKKENACVQCGEGCSECSADTPAQCTACFNGKYLNTNTCVDSNQCPSGTYADSYSGKCETCAAGTSGGSDQTIAGITDCTICSLDEANKRLVCSGCGGGKLLKTDATGATSCVDSGTCVTDYFSEGSECVLCGNEEKGGVAGCKSCSKKDTCTACLAGYFDSGTPKCTACSENCLTCNNADAGQCTKCKPGYFVQGGGTGTCTACGANCATCDEAGDDKCKSCKIGFFLVGSPKGACIVCDDKLSKGIEGCSKCEATGPGNPPKCTSCKDNYHHEPGSAGAVTCKKFCEDPTACGGTAGACEAIVVQDNGDFLHYCSLCGDLKTFPINGICTGTKGDNTCANSVCTQCAAGYFLYMGGCYSATSAPGNLMCKEAPNGVCIAPSENNKYFLVPGAASNQQSVMACENPLGTAVGEKAYVGVEGCDTCTAPAPLTEAGMRPARCTACNSGGKPNLAGSGCFSCTVGGCSHCSANEVCEACTNKEQRPNTAGTQCISCNIDGCTRCSEENKCDQCGDGYRLEGEACIATKPSGGNRSGLSTGAIAGIAVAAIVVVGGLVGFLCWWFLCRGKA

SEQ ID NO: 364 - protein, 583 aa, Giardia intestinalis
MFYTLLWIGLVLQLVRATQAEEKCTEVTGGEANTCKTCGAIIGGVSYCSQCNDSGSTSAPTDGACTADNNECTQKEGGVCTQCAQSSFMYKGGCYKTANGPGNMACEAAQDGKCTTAKAGYFLPPDADRDNAHQSVIPCGDEEEITVKNNHKYKGVPHCIQCDAPTAASDANAKAATCTACEDGFFGATCEACQDENCATCAVTGSNKCSKCKTTGTKTYLKVDSGSTGTCVEASACTGATFPKVDQQGNKCAGCNSVPDGGIDKCATCNLLTQGSRVTPLVTCLTCEQSKYLTPEKNACLDACPAGSYATGQACTPCDPSCAECSGAGASRCTACPAGKMLRYADEGKLNEGGQCVEGCVEGPECEACGLTIGGTKYCSKCKGSNVPLNGVCTSNAARAQFCTTAADGACTVCAAGYFIQGGGCYKTDRLPGKSICTTDNGGKCQACANGQNPDGGTGVCPLCDSTCKTCTAGQTQQCQSCFSGYYKSGTKCVKCDASDSGITGVSGCVSCAPPSNSQGSVTCYTKKDNTDNGGGDSGNGESNTNRGGLSTGAIAGISVAVVVVVGGLVGFLCWWFICRGKA

SEQ ID NO: 365 - protein, 805 aa, Giardia intestinalis
MLSLLASFLLGSSCGISADTYRNSFGAECKKHTGSCARDRCLFIGHEELCTQCIPGYVPINGTCQQLGGGSSVCIPDDASSPTRCVECRPETGAFLFYGGCYTVDQSAIGGDICLQAAGGRCTECNTDADGRHVFANPDAGAAERCILCSDTVGFGGYRGVSGCLDCMQPISNNIGVALCTRCNYAEKDNGIGPIDYQCQAKGLHNCINGYCTSCYKTHLPYSGGCYSRHTATGFAVCAEANQYELDNVTVCTECADTSHAPRNGAYTLVSASGSLFSDCTKDADRGLCTGCSSAGKSFLFYGGCYDRSSHIGSRLCSEVAGGACKQWRSSFDFTFSKAGGTERYLCGDANNGVHGCATCRYGNGVECTRCSAGYLGVDGRSCGEDCSGNTQGACSEVVEESSSVKILSCRCVCKPTFYNSSGTCASCTDSCAVCKDGTSTGCQQCSPGKILNFSVVSSESADCVSQCVAGSECAECGLTIDGNKYCTRCKDSSTYPFNGVCVPDAQEDAYCAIYENGVCTACSEAAFLMSGGCYTTAHYPGDTICDKQAGGKCTTTKEGYGISADGKLQPCDPTCLECKAPGPGRCTKCPSGKLLRRAPAAATGSCIEPGACADGYYADGDACLPCVVPGCRACGRTSFCTECAGELFVGLDGRACLRECSGDRVVGEVSGGTRRCWCERGFAPALDRSGCVPAAECPPGTPWCASCDESGRCLSCAAPGHNIQVDQRTCAEGCGDRAAPDQGVCVCETGTVLDKDACVPINALTGRKMMVVTTSAAAAVLVIGVLAGFLCWWFICRGKRRCYR

SEQ ID NO: 366 - protein, 823 aa, Giardia intestinalis
MGIALLPLIAVCLLAGVFSQEAPIYRNGFGYSCANIASNCLPNSCILDLSGGFLCVECSPGYVPINGRCTSANADQAKAFGCVKSSQGWWCTGCGANHFLFYGGCYEFSQSWKASICDRAEGGICKDCGKGDTVYAPIVFSNPNTTTPERCIYCGDPVGFGGYSGAYGCQSCKQPRLPGKTEFDCEICLNISTCPFDYRCESVVGVSVFGYCERCPKTHVWSASACYAIGSITGDTICLPRNVIDIKGQSLCTQCANSSEVPRNGRCRPSSGFEDVCIKGPKIGRCESCRDSNAIKHLLFYGSCYQFGGSAENLIGSYICQKVQGNICIACNSSTKEVFTKNNGCWRCGDTANGGIAGCQRCEMKGDALQCLECRDLYLSLDKKSCLAGCPRGQKGVRDPSSSIHSCTCDDGLYLKDGGCVKCAVENCAKCNESKCSKCRYGYTLSNDQCAETKCKDPNCDACENRNVCTKCSNNYSLDQNGLCVKDCLGSAGHYKATVGDVSRCVACTLGGCAVCESADRCKTCRDGFYLESQEGCKPCSSECATCSGPEAGDCTSCPAKRRLQYSDGTKGSCVPQCVKDGSCAACGLTIDGTSYCSQCVKSTEYPRNGVCASTGSRATGITCANAFGGQCITCGPSSFRLNGGCYTSKLLPGKTVCSGERDGWCENVAAGYGITYNGTLLTCPEHCKVCTDGSCSSCNSGFYPENGVCNACPEGCATCPHGRACFDCLAGYYFSENICKACHKAVPKCSLCAVPEGATQPVCLEYGRSPRPALSAGAISGITISVVLVVGAVTAVLVWLLVFRKRAGVPPLYKQSTVASTQ

SEQ ID NO: 367 - protein, 636 aa, Giardia intestinalis
MFEKVLFASLILQVAQGECQDTGGPTKCASGKCDVWLNGVKYCSQCSVESEHLINGECVANDSDNNCESDTKGGCTSCKTGYFLYEGGCYTINAEPGNFVCEDQSASGTAGVCGACKAFNGFFKNPDDAAKQSCIACNRTEPLGTVKGVADCIQCSPPPGSLGTREDKVAVCSRCKDEKYLKTDGTCANDSSGCTVFTEFAKADPENGNKCILCGDKANGGVADCETCASKGTRIAETPAVKCITCSSEKAPNGDGSACVDVPGPSPSDCPVENCQKCSADKKTCEECKDKNYLTPTKMCIDRCEYITGYYSGTEGGKRVCKKCEIANCIACNEEGKCVTCKDGFYGEVCSLCDSSCKTCGGSAANDCTSCKSGTVLDYTNGQKGRCASECAVNTDKASGNCKTCGLTIDGTRYCSACSQDDEYPQDGVCAPKASRIDKCKDETIKNGVCDMCADGFFKMNGGCYSTGQLPGSMVCSNALGTGGTCKTPVEGFSLTGNSLVACYTGCAECTTTEDCSRCMDGYVEVGKVCTKCHESCNTCESDAVTCKICAFGYYKESDSNGPCKTCSEGLAGCRQCTMSSANAFVCFEMGDNTSENVNRGGLSTGAIAGIAVAVVVVVGGLVGFLCWWFLCRGKA

SEQ ID NO: 368 - protein, 418 aa, Giardia intestinalis
MLVVVFLVCVTVLAKCSGATCVPNADGCAEALTTAGCATCTAAGPDQTCLTCSPPNKVRPDKKGCIAACPETVSTENGEFCECTDGHKPSPDGATCVPNACNTPSCKTCNNPETDNEVCTECNGDSYLTPTSQCVPDCTAIGGYYGDSADRKCKKCSSECAGCVGPASNQCSACPAGRALTYSDASHPGNGGACGDACAADKNGCKACGARIGGTDYCSHCSDNAQAPLNGNCATSSARVAFCAAMGAGVCTKCAANYFLQDGGCYEATRQPGKQICTLATNDGKCQTCANSLQPNNGVCPLCHSTCKTCSAADTASACTTCATGYYMVGSAAGACTSCEADSGSVKGVSGCLSCAPPSGNTGPVLCYLTKDDSTGGSTNKSGGLPPGAIAGIAVAVVIIVGGLVGFLCWWFLCRGKA

SEQ ID NO: 369 - protein, 424 aa, Giardia intestinalis
MLLLVLCFALSTLAVQCRGSQHSSCAAGQCKVVRGVEVCTRCRAGHVLVNGVCTGNSAGYEVVSGCPVLNCAQCNEDGRTCDRCDDGYDLSKEKTECTKVPEQQCNTPNCKACDNPRTDREVCTECSDGNYLTPTKQCTQSCGTIGGYYDGDKTCEPCDPSCVACTTKGPTKCTLCPPGKRLQYTDEGAPQGGGSCVDECKPEGGAGGCETCGATIGGTKYCSKCSTSSEYPVNGVCTADNARASACKVKDGKGGCTTCDNGYFLQDGGCYKLGRQPGEQVCTVAGNDGQCQTCANGLEAQAGDCLRSACHPTCKMCSAADASTACTMCATGYYKIGLDAGACTSCEADSGSVKGVSGCLSCAPPSGDTGSVLCYLTKDDGTGGSVNKSGLSTGAIAGIAVAVIIVVGGLVGFLCWWFICRGKA

SEQ ID NO: 370 - protein, 842 aa, Giardia intestinalis
MYVLLGLVLLSIGFLCIDIDSESSPFENSIDSKDPRVEALVLVTCASDANRRTCALGMCLNLGSAELCLKCVPGLLLIDGACVGQDSYEVAFAGCEIDPESYACLSCSSLKYHVYNGGCFGAASGIFEFAEPPERGSTPTCEEVISFNMFQTVPGKCKQKHCNIDLGGNKYCSRCSVKSEYLVDGKCLSSTNNGACTSQDSPDGTCKSCGAGYFLYKGGCYSITHGAPGNLICKEVDTAPGVCKLCQDGFFRLPEPAADRHSCMLCNDTSEYEYDVPDSYYDVRTFTGVKDCRKCSFKGEVTTSLNKPVCEACHSDYYLLSREDSAMCLSSQECASTYFRKTVDGTNLCVFCGDTSRGGLDGCSKCTYAANTEIVTCESCLLYQYEKVVNNVLTCVSLDECTAPYYPKDSDDADNIWDKQCLLCSDTTKNGIQDCTACTYTSTGLKCIACSGTKKPNAAGSMCYDCNIVNCEECSSSMVCSRCAPGYIISSSACIVDPSPCSVLGCKTCVSGNKQLCSVCQEGFYKDGTTCRKCATGCTVCSGAGAQCTSCEQDRFLLKSGSSDSGSCVTACGDGHFEDTTLKVCTRCSNAHCKRCAGPSFCTRCNDDMYLKLTPSSTECVSGPQCYTESFPQEDFDRGNKCVPCGDNLVGISNCVECTLDGGLLSCSKCKSGSLLDLFRRTCVTQCPQNSTPKEENGAMACICEDNYAPSDDGTLCEPTKPCPQYQGCARCDSLDRCVQCVDASDNIQLDNMTCQRSCPSGATVKRGRCHCMGGQVPSGNACVDPPNNSASKLSTGMIAGISVASVAIVVVIIGCLVWFFLRKKSSGSSTREPSLFRPLSS

SEQ ID NO: 371 - protein, 143 aa, Giardia intestinalis
MLLLVLCFALSTLAVQCRGSQHSSCAAGQCKVVRGVEVCTRCRAGHVLVNGVCTGNSAGYEADSDCQVDNCARCAQGKPAECEECNPNFDLDNGTKQCVSSSINKSSGGLSTGAIAGIAVAVVIVVGGLVGFLCWWFLCRGKA

SEQ ID NO: 372 - protein, 589 aa, Giardia intestinalis
MFIESLLVGVILQSCLAGQVSSGTCEEATSGEETGKCAQGKCDVIIGENQYCSQCSTPTEFPIDGICTTEKSTNTECTTGGKCTSCMEGYFLHKGGCYSIAPEKPGHILCIEAINGVCTQGADGYFAVPGALKTGESIVTCSDSTTGVTTSSGTYKGRANCEKCEPPPDVMGFRTDRLARCTRCTESRYVKTDGSCAEDANGCISGTEFGKVDVQNGNRCILCSDEINGGIADCNTCSKREDIVACSACNGAKKPNKAGTGCFECPGKDSTANCERCSADNACEVCSNNNYLTPTNLCLANCDGLPGYFMDTEAKQCVSCSKDCKECTGKATQCTACSPGRMLAYDKEGAYPYGTCVDQCVVAEGTVPGTCGTCGAKIGGTAYCSKCNVAAEVPVNGVCETNNARNAPCAEADNAGGCNRRADGYFLFERGCYKTDKQPGMQVCSDATGINGLCKTCANGLPADNGNCFAQKCHPSCKTCSTAGDASKCKVCADGYYRETAGGTDGECKPCSQGKPGCTLCKHSGAGFTCLSTDPFNGDGDDTKPVDPSSSNESSLSTGAIAGISVAVIVVVGGLVSFLCWWFICRGKA

SEQ ID NO: 373 - protein, 836 aa, Giardia intestinalis
MIFVLLLLLSGVFSECTADNECGGDGGVCDVTISGKRYCSKCAGSDAKARVPINGKCRLLSLSRSICQVPLSNDPNPGTCTGCIRDFLFYRGGCYRTAALINAICKEKHIIEEGMYCGACGIEGDVPINGVCVAAGAESSGNTCDKGVCTACTAGYFFHYGSCYKFGESPGSIVCPNQSDTTGSVCGSCGPKFVKNPNASSSATSCLACYGLDGTLFCDECRISVLTGEGAKPTLCTRCKSGHVPIDGRCVSAYSATAALAGCSDVSTRGLCETCSSGYMLFYGSCYSVDGPIAQAICATENQIYLGGRVFCRQCAQTDHYPIDGLCIADKGSHTCADGVCTACDTSKTTPLDNSKVFLFYGGCYNASSAIGSLICLDASNGACSTCNTTGTSNVIANPSSADGQPKCLACWDGAATGVANCGGCAATTEGDSKIVCSKCTDSTEPKDNACPQALPPATPEGCAVQGCQACSKDSATACDACLPPLVMKEDRTKCFGSCLALGPGYYNNSGTCSPCMEHCLLCADGATCSQCDEGYYLALSSTNPPQGTCRACAAGCSACNDGTDTGCTACLPGYYIASESKANRAAKCVLCNTTEGGYTGIPNCVACFSTVGNNGAKNVVCSQCEEGYVKKHDGSQTICEPPTPECNVAMCSVCADNSPDRCEHCTTGAYLCPRTAACTKDCASCGGSMYPDGDLGECQPCDIPSCRVCATGLKCKSCAENAVPISPDVYHTACMGCSDTGGMDGWVGLAGCTTCELTDRGGGSVNCLDPGYYRRGGLGGGAIAAIVIAVLLALAVAGFLVWWFVFRRGRSSRRGGAKYTSLVRGESYDYRQSLI

SEQ ID NO: 374 - protein, 824 aa, Giardia intestinalis
MPGFPSVLLLAFLSGASADTYYNRFGVACKDGQTDCAQDRCIPVGSRQACTQCKPGYVPIDGRCQGYPGAAPSPCAPDDPVSPTRCVACSQDGTFLFYGGCYSIGQPSSGSMGGLLCSKASGGKCTECKKDASGSYVFTNPDTGAAERCILCSDTVGFSGYKGASGCLDCLPPITEKVGTALCARCHYTNEDRHHYPIDYKCQASGPHGCINGYCTSCYKTHLFYEFGCYSRRSSTGLAICAEANQYELDTVTICKECANSSYAPKDGKCTPIENGVSSGSSFSECTKDKDKGLCTGCSDSADYFLFYGGCYNRHFVPGSKLCSAVASGACTKWNTKLNLLFEKSDKNGYLCGDAANGGISGCATCSYASGAVTCTRCSAGCLGVDGRSCDEDCGGDTRGERPGLAGGSSSASASCRCVCKPTFYSNSGTCTKCTDSCAVCKDGTSTGCQRCSPGKILNFSIASSESADCVSQCVVGSECAECGLAIDGSRYCTRCKDSGMYPFNGVCIAEPAQRDAYCTAKANGVCTTCSSSVFLMSGGCYTTNTYPGNTICDKQADGKCTTTKEGYGISADGKLQPCAPECLECTAPGPGRCTRCPSGKLLRRAPAAATGSCIEPGACADGYYADGDACLPCVVPGCRACGRTSFCTECAGELFVGLDGRACLRECSGDRVVGEVSGGTRRCWCERGFVPALDRSGCVPAAECPPGTPWCASCDRSGACLSCSAPGHNIQVDQRTCAEGCGDRAAPDQGVCVCEIDAVLTRGACVSAKEVARKRVAVIAGGTMAGVVVVGGLVGFLCWWFLYRGKRAGAFSSTTALVRPKSM

SEQ ID NO: 375 - protein, 633 aa, Giardia intestinalis
MFYTFLWIGLVLQLVRAEGECTPVTSEDPSTCKTCGAMINGKEYCSQCNDAGGTTSAPTDGVCTTDNAVCNPKAEGKCTTCTGNSFMYKDGCYAIAKEPGKSMCGAADAGKCTQAKAGYFLPLDADRDATKQSVMSCGSDEEITAGNAKKYKGVLHCKECRQPDSNAGGAAVPAICTACEDGFFGAACEACHSSCLTCEATGETKCKSCRDGYFLGATGGGQGKCVSCGDTSSEAWKGVDGCLRCTTSGSANTPATCNECQEGRYLKDGGSAGCVLKDACTGTHFPNDNVEGKKKCLPCGDRANGGIENCEECSLLSPVSRSATALIKCSKCGSDKKLSPLGDACLDNCPAGTYTSSSGNICKPCHTSCAECTAYTTGENSCTACYPGFVLSKGDADSTGTCIPECTGKYAENCEATKCTAVVGGSKYCSKCKTGYAPVDGICVSTTTREPTGCTPGNGVCDACTGTYFLQSGGCYNAQTLPGKMLCTAANAGKCQTCAATGQNAAEGKCPECSEGCAKCADSNACTECYSGYYKGAGNKCFKCTSGDNAVNNPITGVADCISCAPPTGGNGGPVTCYVKADGTSGGDDGTGGSTNKSGLSTGAIAGIAVAVVIVVGGLVGFLCWWFICRGKA

SEQ ID NO: 376 - protein, 2529 aa, Giardia intestinalis
MLVAIFGLVLSCTHGNQPGECAAGKCTILGDRYCSECATPGEVPINGVCIPYNDPRVVASGCASEAGKLLKNFAKTCSSCVEKNYFIHEGGCYNILYSPGNLICAELTGNVCKICSLDYYLDTQVTPPTCKACHAHCNSCSGSSENQCLSCPPDRFLDGSLCKKCSDKPYGIGNCRSCTMNIDGSLKCLSCQEKYYLAGNQCLTCPNNCAICTGATPNECLLCIDNYSYDSQTHTCILTCDKSKVAKSGKCAEDGCTAFRNKFCAKCSLDTEVPINGVCTSNDQNICLHISTSSGTCDSCKKGYILFQGGCYHVDTELGLKACAYTISIKDATFCANCGTPGFVPINGVCVPYNSPSVVASGCRDSVGGLPTLASIRCTSCGKSYFLYQNGCYSPESAPGNVICNEVDKAGKCRLCAYNYFRSRGDCIPCHSNCASCLGPNANDCTSCTPGIFFQVFSMGKGMCKYCNDILVQYDNAGIAHCAKCLPLPRGQRAQCTVCENGYLLIDNHCEMSCWTDGLAPGSCKPDHCNIFSSALCSCCANDNECPINGQCTSALIGAKVVSGRCTECPPRYFPYEGGCYEKGTTIGLSICKDVDNTTICSVCASGYTRTRSECRPCNIKHCINCDGGVDTCNSCAYSYQLQKNKGKDSCVKACTEELIPGGCIYGGCVVRDKTFCERCSVEYEVPIDGVCRPLQEDAPECAIMEGGRCQRCSKGYLLYYGGCYNTIKPVIPICEKEHTITGYGFTYCKKCTLETEYPVNGSCTTEAYGNTCKGGVCTGCGAGYFLHRTVCFTPDFYPQICIKAKAGVCEVCGPTYYLNPVRSSTIQSCIHCSDVDGIFGYTGVAFCKTCLAPLISGAGHCTSCLNRYLLVNGICEESCPLSSDSLQPISGKCAVGFCNVLGATFCSKCALSTDALIDGKCTSVDMENVCKKSDVPNGTCIGCAGLFFYYKNGCYNPKTYPGNAICNEYAVMDGVTYCFRCSILSDLPINGHCVPMSDSKSSPCVLARIPNGQCYYCVDNYFLFKGSCVSADIAPGNALCKSIGSNNGICDICKEGYYASPDRSSVSDSCLLCTEDNGTLKGIPHCKSCKVSNGLLVCVVCEELYRPMNGGTECVQTCVEAEADPKEHRCKKGKCDVLGTFYCSQCAADAEAPVNGVCAPVAGGICIPYEQANGTCKYCTHGYIKYRGGCYETGSLEAEDICDAQDVVTSGAGSFCARCKHKDEVPIDGECKVSDDCTVKEDGICKSCKQGIKSFQIAKDGSSTTVACFTKCPDGMYESAEFCHICDKSCKTCRDSSTKCTGCAGGFYLAAERCVACGVPHCLTCSAADTCTSCQDGYYADGNSCTACTPGCKNCDGTGCKVCKDRFALDNNACTEACPIGLLFTSCAAGYCNVNGTLACSRCALLSSVIIDGKCKANDDACIRTVPSSGTCAACKDTHILYYGGCYDKSTAAGTAICDSQHQAMLGPYAVCKQCKRDGEVPIDGSCAALTDTKAIRSQCVAAASSPTSCTRCGPGFFLHAGGCYELGRSPGAVLCAVAADSAVAGVCTSCASGYYSTGLLDPTKESCILCNNTSETNGYTGVDGCMECYPSEAPRRVICTRCGDKHIPNEDGPQCVQSCNDSGSESGRCKAGGCTAMDSLYCSRCALDYEWPINGACTARDTDYVCEKGKGVCTGCLRGYMLYMGGCYDPAAIPGSGICKELLTIGGRTYCKWCNIANEFPRDGLCTKVMPQGVLCLNGLCVVCPEDYFLHEGGCYSITTAPGSEICEVLGTGREAGTCRQCRPGYRHNKETLTCMPCTISNCASCEIDVDYCTECIQPYTLTGVGAGAYCAKVCKRVGQDACSWSSCTVMDGSLCSQCASSDYVPINGVCTLYPGDARSLAGPCVKDAAKGRCTACRGNYFLYQGGCYSASEYPGTGICDERDATVLEGQVVCGRCLIDGEVPLDGTCAEPQEGLICSKGACSRCGEGMFLFEGACYTKGRAPGTSICGDTAKLTSGCAACEAGFSKTDKGCVRCSDPNCGACGGDPNTCTACRAGYYLQSTSCIVCHSACRTCDGAGADKCKECADGYFGTFVAPGPGTCLACSDTSGRDGWVGVSGCRLCDAPKVAGLALCRDCLPGYKTLSTGTGVTCHAVCPVAYYEAAGSCLPCATDNCATCTNTACTSCVPEHIWNGEECVLEVCPAQCLCKEQSIACTGCRENAVEVRPTHSSASRCLLCSDARAGGGWTGVDGCQRCRLADRVGPVVCLACESGHKTLALDGVLLCPGDCPADGFWTSGSECIPCAAGCLRCTSTTACSMCSQGYYSTQSAVSAPSDCRPCDDATSHNGFAGVAHCAVCTADRARAAITCHACAEGYGLSGGSCSPCAVAGCARCDGGVCTSCKRGWHLAGDRCLACLSPCAACSSATSCLACADGYFQATPLGGPQDCVPCDQTAPQGLQVAGIYGCGLCQAQAGSSTILCLRCTNGDLPLENYCGGPSTGRRLGPGAIAGITLGIVVLVGGSIGLTFILVVSKNKSQANGLRPLTA

SEQ ID NO: 377 - protein, 682 aa, Giardia intestinalis
MLLITLWFVLNTFAADCAQKSNTQNCVQGKCEVIGETEICAQCNQGNVPINGECVGAEGAKAKCTTAEGDGNQASDQTCGKCLQQTFMYKGGCYDTTGIIGQTICKTLGGTAGKCEACNADNGFFTNPDATSTIDSCISCGDAAGITIGKDNNAKTYKGVSGCAKCTAPKQLSQAAGTAVAICTECTAELYLKTVAEITSCITIENCNTGFFPMIDKENENKKLCTKCSETNKGGIADCNECIPRTDDPTKGKCTACTGDKKPNLEGTECNVCTGQNCAFCVSGGACEGCSSGFILDGENCVKSDCKTENCKACTDPKAAGEICTECISTHYLTPTSQCVQYCQVLGNYYDGANADNKKTCKECTIANCKECTDKGQCQTCNDGFYKNGGACSPCHESCKTCSAGTANDCTECPVEKILKYTGDKGACIPQCVVNAAEASGNCKACELVIEGTKYCSTCSKSDEYPQDGICTVKAARVATCKDGSITSGVCKQCADDYFLMNGGCYEAGRYPGKAVCTAAQVGGTCKATADGYKLDGGTLTACSEGCKTCTSDSICDACKNGYVKVSNSCKACSTGCATCNTNPETCTACLVGYYQSESKCIACDKDDSAIKGISNCLNCVPPSSNTGSVLCYLMKNDGTGGSTNRSGLSTGAIAGIAVAVIVVVGGLIGFLCWWFICRGKA

SEQ ID NO: 378 - protein, 803 aa, Giardia intestinalis
MTTLASLVLILTYLLGAFSSDEESIYHNGFGYSCNSRVSNCLPNKCIYLREVPYCVECDSEYVPINGKCVSVKSVTSTGTGCVKSSAGGWCTGCNDGYFLFYGGCWVEDTQKSIICRRAEKGLCKECVTESLASVFTNPNTTAPERCIYCGDPIGFGGYNGVYNCQNCRQPRLPGTTEADCYGCLQQEMCSFDYRCKPAGDIASFGYCTICPKTHVWSDFACYAIGGATGDSVCLLENIIEIQNRSLCTRCTNPLEAPQNGRCLSISKFDNICVKDPEKGQCTSCQDRDAEKYFLFYGGCLRKDTSYQIGSQICQEVRDNVCTMCKSSAEEVFTGNNRCWRCGDSANGGIDGCQRCKMGSDGLQCLECRDLYLSLDKKSCLASCPRGQKGVRDSSSSIHNCTCDDGFYLKDGKCVKCAAENCAECDEASCKTCKYGYTLSNDQCVETKCKDPNCDICEEKDVCTRCNNDHSLGPDGLCVKDCLSSAGYYKDTVDGVSKCVACTLDGCATCESANKCTTCRNGFYLESQERCKPCSSECATCSGPEAGDCTSCPAGKRLQYSDDTKGSCVSQCVQDGNCAECGLTIDGTSYCSRCTKDTEYPSNGVCASNGSRVANIMCTVISGGQCIVCGPNSFRLNGGCYTSTLLPGKAVCTTESNGWCDSTVAGYGITYNGTLRTCPENCKVCTDGSCSSCNRGFYPENGVCNACPEGCATCPHGRACFDCLAGYYFSENICKACHKAIPNCNLCMVPEDAVSPVCLDHSNTPRKSALSAKAISGIAIGAVVVVGTVAAVLVWLFVFRKKN

SEQ ID NO: 379 - protein, 236 aa, Giardia intestinalis
MLLIVLHFVLGTLAEACDGGAAVGCVDRGCETVGTVEVCTTCTAGKVPINGICKAHDDGETTAAAGAGCEKKEGGVVDGTSTTCGKCTSANYFLFRNGCYDATKGVGKTVCTAANNGICTAPASGYFVVPSPDAVATEQSVFSCSDTTGVTLTGNKKYVGVANCATCSAPTEDERVAKCKTCNDKFSLEDNQCVSSSTNRSGLTTGAIAGIAVAVVIVVGGLVGFLCWWFICRGKA

SEQ ID NO: 380 - protein, 719 aa, Giardia intestinalis
MLLVALYFAMSTLAADCQPDGDHAATCKSGSCEMVGGAEICTQCKAGGVPIDGLCRPFSASHAATAGCTKNDGAVLTGSDTTCGKCSGADYFLFMGGCYNKGTWPGNKVCTAADKGVCTTCKVDGKYLFQNPVNPITPGNECVLCLDVTPRDGVMGVASCYTCTAPGGGSGAAACITCQPGYYKEGTGCKKCVAGCIDCNAASQCTTCEDGKYLKTNTCVDASGCAETEYADKKTWSCKACDPDVTGCMACEYNDATGKPKCTNCNGKLIKTAVDGTTTCVDANSCAQSNQAGTHFLSNDNRKCIPCGDDSESLEADKGTPGCKTCTKNGAKPTCSECLDGYYNSADSGTATCEACPGKNCATCDKSTKDKCKTCTPGFFLKDSASGECIPCDDTKNGGSEGCSVCSNNSGFECTDCKPNYYKRTRGRSAVTCEKFCEDPTACGGTAGACEAIVVQDNGDFLHYCSLCGDLNTFPIDGICVKEKSGNTCENGICTQCAAGYFLYMGGCYSAANTPGNLMCKTAEGGKCTAPNENNKYFLVPGAASNQQSVMACENPLGTAVGEKAYVGVEGCDTCTAPAPLTEAGLRPARCTACNTGSGKPNLAGSGCFLCTVGGCSHCSANGVCEACMNKEQRPNTAGTQCISCSIDGCTRCSAENKCDQCGDGYRLEGEACIATKPSGGNRSGLSTGAIAGIAVAVVVVVGGLVGFLCWWFICRGKA

SEQ ID NO: 381 - protein, 721 aa, Giardia intestinalis
MFGRFIFTSCILQLAWIIQTTAAACTPGETGSTKCKTCDAIIGTERYCSECDQAGEGPINGVCTSTKNGNTCDNKVCTQCAKNYFLYKGGCYKFGEAPGNTICEDAVDTVGGTDGVCTTCKAANGFFKHPVPAETKQSCIACNETVGVVDGDTTYKGTPNCLKCNSPSNAIRAKTDKIAVCTLCDQTKYLKEGTCVEKVDCGTNMFGKPSVQDGNKCIECGNSDVGIESCAECTVSDEPSNKPTCTKCAGDNYLKTTDEGTSCIHKEHCTEAYFPNDSVDNKKQCVLCGDVINKGIADCTACNLLSSPSETVLIKCSACMNGKKPNEDGSSCIDAPEPSPDECTIKGCQVCSEDKRTCDTCQSNNYLTPTKMCISDCKNLGNYYAIIEQTKKICKECTMNNCKECAESGKCEICNDGFYLLDEECKPCNDTCKTCEGGMEADKCTSCKSGSALIYAGNGNTGTCSFGCTPKTGTDPGSCKACDLTIDGTRYCSVCNVGKEYPQNGACAGIRTRASSCQDGNVNNGVCSKCEAGFFLMDGGCYEITKYPGKTVCTKTAADGTCETPAPGFSLVSNTLKACFEGCAKCVTGDDCSECINGYVSGSSPNTCEKCSIGCAMCYPTATTCTACLAGYYKSGPKCIACDKDDSAIKGISNCLNCAPPSTDSGSVLCYLMKGSDSTGGSTNKSGLSTGAIAGIAVAVVVVVGGLVGFLCWWFLCRGKA

SEQ ID NO: 382 - protein, 194 aa, Giardia intestinalis
MLYLIVLILFGLAFAANPVPKDCAGNGRPSCASGKNCLDVNVAGQQKEVCTKCENTHVPVDGTCETIATAGAKCTPKGSPDGTCQSCGEGHYLYRGGCYTTCPQGTPNPETNTCDGVPAPDCNIPNCKSCPDGTCTECNDGFVLGDGNKCVASSVNKSGGLSTGAIAGIAVAVVIVVGGLVGFLCWWFICRGKA

SEQ ID NO: 383 - protein, 409 aa, Giardia intestinalis
MLIAVLLIYTTALAKSVSEAACDPPIVGCATCTGTGDGQTCLTCDPSSNKVRPDKKGCVAQCPANSNDVGGICTCAETYQPSEDGLTCVLKAACNTPNCKACDNPKADKEVCTECNGGNYLTPTNQCVPDCTVIGGYYGDADKKCKKCNSECAECVGPASNQCSACPTGKALTYTNGEDPTQGGACGDACTVDKNGCKACGAKIGGTDYCSQCSVGTQAPLNGVCTANARAQFCTQVTEGSCTSCSGGYFLKNGGCYQADRQPGKQICTLADSKGGCETCANGLPPSSSDVCPSCHPTCKTCSVASNPDKCTSCAAGYYMVGLNDGTCTSCERDSGNVKGVSGCLSCDPPSNSQGTVLCYLTKDDSTGGSTNRSGLSMGAIAGISVAVVIVVGGLVGFLCWWFLCRGKA

SEQ ID NO: 384 - protein, 419 aa, Giardia intestinalis
MFAKLIFISLILQLTEATRPAGRTRSEGECTSLGAAGCATCSTGDNGETCLTCENPDEFIQLDEKGCKPACNAEGEVEDSAAVPKVCKCNEKGGYKPQGGKCVKGSEGECKTENCQECTNKGTANEVCTKCISTHYLTPTNQCVPNCTTISGYYGDNADKKCKKCNSECAECVGSANNQCSACPAGMMLQYTDASIPAYGGTCVGQCSVSATGEGYEVCGARIGGTDYCSKCKGSQVPINGVCAANPSARAPACTSNGQGVCTGCTGDYFLRDGGCYKTDRLPGKSICTQAANGQCNQCANGLQAQGGACGACHSTCATCSAADAAEKCKTCATGYYKTSDNEGSCKKCSEKIPGCKQCTSSSAGSVICLESEAGTGGSTNKSGGLPPGAIAGIAVAVIIVVGGLVGFLCWWFLCRGKA

SEQ ID NO: 385 - protein, 827 aa, Giardia intestinalis
MLGFLWVLLPASLCKDSRDTYYNSFGVVCNDTQTNCAQNKCFSIGSWTPCVQCVPGYVPIDGKCQEYSKTASSPCIPDDPNSPTRCIRCTSTENIFLFYGGCYTITTTQDKNLGDFLCSEASNGARTECKKDASGSYVFTNPDTGAAERCILCSDTIGFNGYKGASGCLDCLSPITDKIGIASCTRCYYTDKNKRLYPIDYHCQASGPHTCRDGYCTSCYKTHLFYEFGCYSRRSSTGLAICAEANQYELDTVTICKECANSSYAPKDGKCTPIENEIFPSNSFSECTKDKDKGLCTGCSDSANYFLFYGGCYNKHFAPGSKLCSAVASGACTKWNTKLNLLFEKSDKNGYLCGDAANGGISGCATCSYSNNAVTCTRCSTGYLGVDGRSCGKDCSENTQGACSEVVEESSSVKILSCRCVCKPTFYNSSGTCASCTNSCAVCKDGTSTGCQQCSPGKILNFSVASSESADCVNQCVVGSECAECGLAIDGSRYCTRCKDSGMYPFNGVCIAEPAQRDAYCTAKANGVCTTCSSSAFLMNGGCYTTAHYPGDTICDKQAGGKCTATKEGYGISDDGKLQPCDPACLECKAPGPGRCTKCPPGKLLRRAPAAATGSCVEPGACADGYYADGDACLPCVVPGCRTCGRTSFCTECAGELFVGLDGRACLRECSGDRVVGEVSDSTRRCWCERGFAPALDRSGCVPAAECPPGMPWCASCDGSGACLSCAAPGHNIQVDQRTCAEGCGDRAAPDQGVCVCEVDAVLTRGVCASTRDAAKKKTAAIAAGTTAGILVVGALVGFLCWWFICRRKRASFSSSCTTLIPPSKPM

SEQ ID NO: 386 - protein, 654 aa, Giardia intestinalis
MFIKILWISYIPQMIRATCQDSSGCKPESCNVRIDADEYCSECKAVGSYIVNGKCDPANTENACTAKHEALGYCTSCTAGYFLHKGGCYKFGEPPGSSICSDAAPGVSGAVPGVCSVCREGYFKNPTITAESQSCISCSETTAVDNVNGIAKCVACQAPIEAGNSSPNPAKCTKCESGKYLKVTDDSTQCLDDPSACGEGYFGKEDIPNGNKCLICGDKDNGVVGCKTCTNSGSVQCQTCLDGYFKTSNTECTLCNENCLTCKAEAAKCTSCKADTKPYFKDGADGDQTGTCVDETECKGDHFPATDTGSANKKVCVPCGKADKGGITNCKTCAFKVSSTREGPAITCTECATDNLSPLKDECMAACPAGTYANSNVCAPCHKSCASCQANDKETSCTACYPGHSLLYGVGGATGTCIKECTGEFGANCADGQCTADVGGAKYCAQCKDGYAPIDGVCTEFKSNTRNLPECSPKNGKCTKCTGNYALLSGGCYNTQTLPGKSVCKAVANSNDGKCKTCANGQTPDPATNFCPLCDSTCAECSTKNDADACTKCFPGYYKTGNKCIKCTESSNNGKKIDGVPNCLSCEAPANAGPVICYAKADGNNTGDDDGAGGSVNKGGLSTGAIAGISVAVIIVVGGLVGFLCWWFLCRGKA

SEQ ID NO: 387 - protein, 504 aa, Giardia intestinalis
MLLVAFYLILGTLGARCKGHQHSRCAIGKCRVVNGNEICTECRATEEKPINGICKSEGNSVVTTNTRHGPQCTEEKCSTPNCKDCTNPKTENEACTECDPTHVLDGGNCVERKCSTPNCKDCTNPKTENEACTECDPTHVLDGGNCVERKCSTPNCKDCTNPKTENEACTECDPTHVLDGGNCVERKCSTPNCKDCTNPKTENEACTECNNGNCLTPTSQCVPACETLGAYYADSNNVCQPCDPSCASCLGTDKTKCTACPAGKALKYTNDEQPEQGGACVDECRADADGCAECGATIGGTKYCSRCGASSDYPVNGVCRTTPGRASTAACKTPDNKGGCTVCAANYFLQNGGCYKTDRQPGVQVCITVTPDGKCETCANSRPADGTGACPSCDPTCKTCTDANDASMCSSCSIGYYQVGTKCVKYDVTDSGITGVSSCLSCAPPPGNTGPVLCYLMKDDGTGGSVNKSGLSTGAIAGISVAVVIVIGGLVGFLCWWFLCRGKA

SEQ ID NO: 388 - protein, 699 aa, Giardia intestinalis
MLSAPWIASSMFDRIFFGIIILQATQAAACQVQSGGSGGTCEKCDAFIGQVRYCSKCNQPDTYAPVNGVCEDVETQEDKKTLCKAHADGTCTTCGGNSFMFEGGCYSSGEGLPGHSLCLNSDGNGVCTEAAPGYFLSPLKANNKVSVVSCSDTTGITDTHTYKGVQYCDRCDGSQLTSSQDGTAECTKCGENKYLTTAGTCGEGCTPDTEFLKEDLNNGKRCFACGDVTNGVANCEKCTAPSLDQAKPICTKCGGNKYLKTAADGTATCVEQNTCTVDSFPVVNAQNGNKCVLCGDVQGAADDSGSTWKGVDGCSRCRKSSSAANPAICEECAVEYLKVESAEKTSCVTSTNCNTGFFPTTDSNDKKLCTRCNDDAHGGIADCSVCSLLTLTSRSSTILIACSACVGKKLSPLNNECMTACPAGTYDDSNVCRSCHDTCSSCYNNANADSCTTCYPGYVLKRDETNTKGTCIKECTGDLVAYCKSGGCTLDVGGSKYCDQCEDGYAPIDGICTKVSSTARDASGCKASGGKCTECGPTYALLSGGCYDTQKLPGKSVCTAAQNKGQCQTCANGQAYAGGNCPACTEGCVKCAGNKDTCTGCLAGYYLSNSKCFKCDADDSQVTGVSGCVSCAPPAGGNGPVTCYVKIDGTNGGDDSTGGSVNKGGLSTGAIAGIAVAVVIVIGGLVGFLCWWFICRGKA

SEQ ID NO: 389 - protein, 600 aa, Giardia intestinalis
MCPKYYWRRAFMRENSLEICRPSAIKNPMLGLLSLLFAASFCRVFTDQYHNGFGIECGQGHEHCLLNRCILIGSAKVCTQCKSGYVPIDGVCRPYSKGASSVCISEGPLSPNSPSRCIDCRLGKSMFLFYGGCYTQDRSSIGGYICSRASGGMCTECNVGAQGSYVFTNPNISAAERCILCSDTTGFSGYRGVSECHSCAQPVGSGVATALCTKCRSPEQGGDLGPIDHQCQAKGPHDCRAGVCLSCYKTHLLHQSGCYSRHSTTGTAVCAAANQYVLDNVTICGECADASYAPINGACTRVQGGTADAEPHDCTQGRDKGLCTDCAGSAESFLFYGGCYGKGSGTGAKLCSAVASGVCTEWKRQFDFIFSKDGKSGGYLCGDAENGGISGCATCSYGDGALTCTRCSSGYLGVDGRSCSEGCGDGARGVCAGTAEGSEPAGWACRCVCKPGLYNNSGACTSCADSCAVCKEGVPDGCQRCKPGKVLEPSVVARETARCVDECTAGGECAECAIAIDGSRYCTRCRDPSMYPLNGVCLAGAREDQYCTSRGDGVCTACAEGAFLMSGGCYRTGVYPGSVICSVQSGGRCKETKKGYEMSD

SEQ ID NO: 390 - protein, 428 aa, Giardia intestinalis
MLIGLLLVCVVVRIHCTSELDKANHKTCTRVASVVDECPIENCQTCSGDKRTCEACKPGFVANGDNTVCSPAPDECPIENCQTCSGDKRTCEACKPGFVANGDNTVCSPAPDECPIENCQTCSGDKRTCEACRSGYFLTPEKNDCLISCPGGSYATGRTCTPCHSTCSSCSDATENSCTTCYPGSVLSRNGGKATGACIPECTGGYAENCEATRCTAVVGGSKYCSKCRTGYAPVDGICVSTASRAPAGCTPGDGVCDACTGTYFLQSGGCYNAGTFPGNTSCIVASGDGKCATCANGQDANPQTGSCPSCPANCSKCSGNSDAKTCTECYSGYYLDVGKACKKCSETSGNIQGVPSCMSCKAPSSPSAPTPVTCYVTQQRTDDGTGGSTNRSGLSTGAIAGIAVAVVIVVGGLVGFLCWWFLCRGKA

SEQ ID NO: 391 - protein, 495 aa, Giardia intestinalis
MDKQSKECKACSTAIPGYTACTYEDSIGGPKCSDYGSKTVRDELDGTTTCVDETECKKDKTHFYEASKCVQCGDNTKQGVQNCKLCTAKNTCETRVDGYKVNGNTCEACTGNCAECGTVGQIDTCTKCMPGYFLKSSSAKICVLCDAQTDRILGCTECTSDIGSLKCTKCKPNYKQSGEPGDLTCTKVCEDKTVCGDTAGACDAMIINSDGSALYYCSNCVGAGYGPINGKCTNTLVSNTCANGICTRCTNDYFLYMGGCYQATTQPGSYMCSTAPNGFCTTSVGQYFKIPGDVATHPSVLACGNPVGTIAGDKAYVLDCTACTAPQAPAVNAMAVAVCNTCDKTKKPNQDGSGCTLCTVAECKSCITDDVCEVCENSKKPNKACNACYACSIADCSHCSADNRCEVCADGGKRPSLDGTQCITCDIDRCTRCSAEDVCGECEAGYAPKDRKCEPGSTGLSLSTGAIAGIAVAVIIVVGGLVGFLCWWFICRGKA

SEQ ID NO: 392 - protein, 596 aa, Giardia intestinalis
MGGCYRTGSQPGSEICTAAEGGKCTECNADNGLFKNPAAAPDAGRECLLCWDTTGANGYKGVDKCTTCETPDKEGAATCIECRDGYFWDNSVKTCQACDEKCETCTNTGATNCKTCKPGTYLKGAQCIDGNSPKCDAGTYADSKSNKCMPCRIENCATCEYLDKINGPKCLTCNEPSTNLLKTEIDGTTSCVVAAKCAVASQPGTHFLSDSNDKCILCSDDKDGTETNKGTPGCRTCTKSGAKPTCSACLDGYFFESGSCVKKCDQSCKMCSAATDATKCESCYPGYFLVESTEPPGKKCVPCDDANSGGREGCSACSNTGGFKCTDCKANYQKEGSQDNYTCKKTCEDVTGCGGIAGACDAAVVDGSGNTKHYCSFCGESSKFPIDGVCVNTGSENGNTCKNGVCTQCTTGYFLYMGGCYSVSTAPGSHMCKTAGEGICTAPSEGSRYFVVPGATNQDQSVLACGNPVGTVTGNKAQSTKAYVGVDGCSQCTPPTDPAANGMMVATCTACEAPKKPTGNGVGCAACSDANCRHCKADEKCGTCNEGFSLEGGKCVSTGGPNLSTGAIAGIAVAAIVVVGGLVGFLCWWFICRGKA

SEQ ID NO: 393 - protein, 1137 aa, Giardia intestinalis
MFAALGLLIASQAAKCTHSYQVSDCAEDRCEEINGHELCTECRNAGYIPFNGYCLKYDSEQHSSCRNADGTPITSQTKCGMCTDSMHLYKGGCYSCGDLYPGNLICRECGKGVCTSCTSNFFENPAASQTVDSCIRCDDTIGVSGVVGVAGCLRCFPPSDPKDSNVARCSACKLATHKPNLKGTACYKCDIPDCVRCTTDDSCAVCGGGYLQGTTKRVCVSECGVGFYIAPTQLRQCKECSATCRTCEGPDGTDCTACHGSEGYFLATKGGTGKCISCGDEQGYAGWRGRANCKTCTPPSTPGVVKCTECEADYSLIDGLCEATCGDPNEECEPDGCNAAWRDYFMCSRCKEGYAPINGMCAEITPNHLSVCVPNKGRCEKCGLHYFIYQGGCYDVEFEYHKFVCLETGTKPEEIGLCKTCADGFQNDGGICVRCQAPYCKTCTQDTNICESCLDGYHDPSLCKRCHDNCKTCVGEGPERCLTCPSGKYLSPIYKNIGVCVYASQCGYGMYGDPYSHKCTPCSAGCATCRDSNEDECTSCYLRTHFLVTAEYGRSRCIECGDVTNPRGIDGCRECTMEGDSVKCLACKAGYTLVDGKCQSNCQDPNCAADSCVVGISEKLYCRLCKTDGHAPIDGVCTEVSGAHPSGCVTGVAPDSARSCLQCGAGYFLYMGGCYRENEEPGKSVCSWAGVIGYASNSNYGLGLCNACAPGYENQNGICRPCAMANCEQCHTGTQGEVCTHCMVGYVMDQAGRCSIQATGSCIVPDCAVCADDGKCQSCGPGFFLTSAGTCVNSCRDIPGHYALDATGESPARCALCEIQNCKECRASDSCAVCADGYFSDNGACAPCDSKCATCMARGPDGCTSCPPGYAIASESRVGRCERPCTPSAEGCKACNASIDGASYCSVCSVQTAFPLNGQCVGLSARAGPACASVVDGACKKCADGYFLLSGGCYQVEAYPGRAVCRAEEQGVCTRGAHGKIVSASGVLRECSVANCAECTADACVTCRVGYVHVNGQCQRCAPGCVACTAPDNPQMCTLCDTGYYQSTTGSAFTCTACSAGNNGMTGVSGCTYCVPPEGKTGSVLCYSFDALPNITPTPEPRSIRKTAIIAGVSVTVALLVTGLVGFLLWWFLCRRT

SEQ ID NO: 394 - protein, 494 aa, Giardia intestinalis
MLLLALCFALSTLAVQCRGSQHSSCAAGQCKVVRGVEVCTRCRAGHVLVNGMCTSNSAGYEVVSECAVANCERCNADNVHCDQCAEGFEANSDKTQCTAKCAVANCERCNADNVHCDQCAEGFEANSDKTQCTAKCAVANCERCNADNVHCDQCAEGFEANSDKTQCTKTPEQQCNTPNCKACDNPRTDREVCTECSDGNYLTPTKQCTQSCGTLGGYYNGDKVCEPCDPSCAACATKGLTKCTLCPPGKRLQYTNEEAPQGGGSCVDECKPEGGAGGCETCGATIGGTKYCSKCSTSSEYPVNGVCTADNARASACKVKDGKGGCTTCDNGYFLQDGGCYKLGRQPGEQVCTVAGNDGQCQTCANGLKAQAGDCLRSACHPTCKMCSAADASTACTMCATGYYMVGAGPKACTSCEADSGSVKGVSGCLNCAPPSGDTGSVLCYLTKDDGTGGSTNKSGLTTGAIAGISVAVVIVVGGLVGFLCWWFLCRGKA

SEQ ID NO: 395 - protein, 643 aa, Giardia intestinalis
MDNDSMFGGLIFVFAALQLSWARRATKSLKEVDQCKDCEANSCELVGDAPICTRCSVGMVPIDGTCKAYNNRDVTTAGCKAGGANVGEDATVCEECGTAGAYFLYKGGCYEANRGVGASLCTQAANGYFVSPGAQKADQSVISCSEKTEITVNGRKYTGVAHCVQCQQPNANMGDTAVGPTCQACEDGFFGTTCEACDPSCKTCEGGNGADKCKSCTAETHFLGATSDTLGRCILCGDTSDAAWKGVDGCLKCTASGSANTPATCTECQEDRYFKAKIENTAESCETKESCIGTHFPNDNADGKKRCLLCSDKNGGIERCGECALLSQATRATALVKCSKCTTGNLSPLGDECMLDCPAGTYADSNVCKPCHESCSGCETGNAEASCTACYPGSVLSHDGSEPAGACIPECTGSYAANCEENMCTAVVGGSKYCSKCKVGFVPIDGLCVSTAARAATACVAGEGVCTSCAGGYFLESGGCYKAGAFPGNTLCIAAGVNGKCANCANGQSADPQTGSCPPCPANCSKCSGDSSAKTCTECYSGYYLDAGKACKKCSETSGDIQGVPNCISCKAPASLDVSTLVTCYVKTDGTSGGGGDSGSGGGSTNKSGLSTGAIVGIAVAVIVVVGGLAGFLCWWFICRGRA

SEQ ID NO: 396 - protein, 719 aa, Giardia intestinalis
MFGKLLLAGAVLELAWAACEEDQASTNGKCKTCGVTIGQDTWCSVCIGENYAPINGTCVDVTTDSVGSVFCTQKAGGVCTQCAGNSFMFAGGCYSSSEGLPGHNLCLRSAGNGVCAEAAPGYFIPGETAGTKPSVISCGDKTGLLITTHTYKGVEFCAECSGSELTDGQDGVAKCTKCGASKYLKDNTCVDNAEACGKGYFGKSDVEVGNKCVACTDQSNGGVSGCAECTYDSKTEKAICTKCTTDYLKKKADGTTECVAVGDCDDTQKGFYKVVDPTNGNKCISCADEAGFAVGADGAWKGVDGCAKCTKPENINTPTKCDECKSGYEINTDKTKCTSATPPDCPIENCKVCSGDKRACEECNGNNYLTPTRMCIDDCKKIGNYYYSTNANNKLACKECTVANCKECENTGTCKTCNDGFYKSSEECKACDSSCKTCSAGTANDCTACPTGRALKYGGDGAKGTCGDGCTTGQGSGACKTCGLTIDGASYCSECAVDTEYPQNGVCASATARAAATCKSGNVAKGACNSCTNGFLRMNGGCYETAKFPGKSVCEEAASAGDTCQTEAPGYHLNNNALVVCSAGCKTCTSNTVCTACMDGYAKTGDSCTKCAAGCATCTNTASACDTCSTGYYKSGSICVLCTANNADNTITGVANCASCAPPSNNQGPVLCYLMKDGGSTNRGGLSTGAIAGIAVAVVVVVGGLVGFLCWWFLCRGKA

SEQ ID NO: 397 - protein, 181 aa, Giardia intestinalis
MSLSYEVQCIEEEDGQCIRCPRGYVANQRLNTCVWNRASEPPIICPDGYFLDKGLCTLCHSSCETCTGSAGPNSCTLCARGYYPAFTEASGLCVPCSTSHGVVSGIPGCVHCARDGSSLYCFERRQLKRNLTTIRKALLISLVVLVLALFSSLILIFAGGSKIKHRQRRLPVRYVARHKMV

SEQ ID NO: 398 - protein, 198 aa, Giardia intestinalis
MFDKLIFASLALQLAWASQTASTAKANPASCDPQNPGLASCDADSCNMEIERQTFCSKCTGGKVPVNGECKTTGEAKMCTAGAGPQAGTCTACTGTQSLYMGGCYDECPYGPSENERVCAEAPAGCNIPNCKSCPDGTCTECNDGFVLGDGNKCVASSVNKSGGLPPGAIAGIAVAVVIVVGGLVGFLCWWFLCRGKA

SEQ ID NO: 399 - protein, 1609 aa, Giardia intestinalis
MRTWILTLLMCTCSNRHHYLHNGNRYLRDDALCRLAAKSNTAKRILFSDVSDCPENCISCTDPHICEVCDYGYTLTNRGRCVDLCIEGNSETNCAVGHCTVFDDTLCSKCAHEGDVPAAGVCNTGVTTCVKDSHGVCISCESGHLLYQGGCYPSKSALAQSICATDNQIVVEGMLYCSLCNGENEAPINGHCTDEYSSYCDATGGQCINCIADGYFLFNGGCYDSNEHPGSVICVEVHDNECTECGSHYPMTDGVCTYCPVDHCLLCENESCTQCQKGYVLRGSGRCVKLCSEGNGLQSCAIGHCTAFEGTLCTKCAYEEDVPVAGICTSGLTTCQKNSSQICISCEGKHLLYSGGCYAATGTHGLQICSIENQITIGDKVYCSKCNQGKEAPLNGECTESATDHCDVHDGTCTSCKTTGYFLFQGGCYTLASIPGNIICAEVSGTTCAKCRDGYGIREGECSPCMIAHCLDCKTDVATCNACDPKYFFTGTDCIACEGEHCAACRDNMCVDCTDKTECNACAIPNCVLCDPALTECLACQEAYEPDKNGLCTPLPASECPLSCLCADQDVPALCTSCKPGFIAAGVISGDTCLSCALEVEHCNLCSYLPESDSIVCEECLDGYRLDGGLCEPCGKGCKSCPHRANKCAECFAETPYFNPALTECLAACPPNSVAAANKKCSCIHGYYSTLQGCEMCDESCDTCSGGEVDKCVTCRSGFFLASGSWKGQCISCDFNSFSDGSVIGVEHCIKCRGVQENGDLIVICEDCDLGYTLKGEVCVLDDSGHEDCPSNCICTDESPTCVSCQKGYFTLSTPSAENCVRCSSAVSGCKTCTVEEPLSRRSAKKVTCTLCDDGKGLVEGTCHSCHTTCKTCNNDPQLCSTCYNPTYKLSLRSDQCVPECPEFSEEQNGRCVCLLGYSISSNGLTCVKDNSACPSVCTCVVGNVCSGCADGYFTFDPSRTDAARCEPCSGDFCSSCGRVPNDATSFYHALGSSRRYTHRRSSESVNICIECADKQGCSACSIEGCNRCSTSEHTECTECMPDYQLSQDKKLCIPLVPICPLGCTCVPGTSTCNGCVDGYFEVDPTDEASGRCMRCNIPTRYIPTRISRARRLERLLSLRGKKADSVGLQIARDASWNGVAGCALCTTPSNPGPAICTQCVQGKHLLVSGESTQCLDACPDGMGSVNNVCFNCSDENCLRCDGNLESCAECRSGTSPTLTPDTELVVCETVCPLGCICEDPESSSVCTGCQSGYYEVSVLARLIMRLRKTDVHCKKCLANCMTCTDENTCLACADGYILHQTGASCVEKCDQGYYIKQGQCAPCTGEHCASCTSETTCTSCIGSSFLSGGKCVTCSTSCKTCGGGTEDDCLTCPTGTVHSTGTGLGSCLQECSATAAGNCTVCNAIIDGTRYCSKCTPGEAPINGRCEPVSTARNVACVTSGDGTCESCSANHFLFNGGCYATSRYPGSAVCTSSSNGLCTNCADGFTNTNGICSNCVLGCSSCSSTAASACTSCTEGFFPAFSGSQGVCKQCDDTTITNGYQGVQNCRVCIAPQQAGTALCLDSGEVTNKSSLSAGAITGISIAVIAVIGCAVGVLVWFLCCRRSKAV

SEQ ID NO: 400 - protein, 660 aa, Giardia intestinalis
MRRIDGLVLLLVTVKSMFDKILFGALILQFASTVPEAKASTCEQSSSEEPGKCAQSKCDVVIGGSQYCSQCSKAGEAPVNGVCTAELDGNNCATKICTQCAQGYFLHKGGCYKIGGEVGSLICADTSSPGVRATAGVCEDCKSGYFKNPEAAANADSCISCGDQAGFTITGGSGNTYKGVQNCATCQPPERANPGSSQQKEAMCESCVDGFFGSNNCNQQCTDPCAACKTTATACTKCKPGPSNTKEYFKVTNLVEKTGECIAQDACTDTYFPTTDKAGTKVCVTCNDETNGGIKDCKTCISKDSVGIVKELTLTCSTCKTDTNKPNVVGSQCFVCPNNDSTKDCGKCSADNLCEECSGGKVLTPTKLCLEDCSGLPGYFMDTEAKQCVSCSKDCKECTGKATQCTACSPGRMLVYDKEGAYPYGTCVDQCVVAEGTVPGTCGTCGAKIGGTAYCSKCNVAAEVPVNGVCETNNARNAPCAEADNAGGCNRCADGYFLFERGCYKTDKQPGMQVCSDATGSNGLCKTCANGLPADNGNCFAQKCHPSCKTCSTAGDASKCKVCADGYYRETAGGTDGECKPCSQGKPGCTLCKHSDAGFTCLSTDPFNGDGDDTKPVDPPSSNESSLSTGAIAGISVAVIVVVGGLVSFLCWWFICRGKA

SEQ ID NO: 401 - protein, 829 aa, Giardia intestinalis
MLATLLLLLLVSSYGASTDTYHNSFGVACDNAQENCMQNRCVVIESTSVCTQCIPGYVPISGTCTEYPGSASSICIPDSTTSPTRCVECKDSASEASMFLFYGGCYDMIDESIGSSVCSKASSGKCTECNVGVGGRYVFTNPDGSAAEGCILCSDRVGFGGYRGVAGCLECIQPVDQRLGTPLCFECDSTTLAPIDYQCQDKGHHICSDGRCTSCYKTHLFYNGGCYGRHTTTGLAICAGPNQYELDNTTICTECANASYAPKNGACTLVKKDSTTGGLFLDCAKDPARGLCTACSSSTPSFLFYGGCYDTSSYVGSILCSRIGSNACEEWNGQYPFIFPEDTAKRDHYLCGDAANGGVASCATCSYASSAVICTSCSAGYLGVDGKSCNENCSGNTRGACIEILGGSESTILLCQCICKLGLYNNSGICMPCTDSCAACKDGTPNGCQQCSPGKVLESSVITSGNAKCIDECTTHGSCVECGLTIDGSKYCTRCKDPSMYPLNGVCTTDAQRTSYCTTKANGICSACSEAAFLMNGGCYTTVHYPGDIICISQADGKCTATREGYGISADGKLQPCAPECLECAAPGPGRCTRCPLGRLLRRAPAAATGSCIEPGACVDGYYADGDACLPCVVPGCRACGRTSFCTECAGELFVGLDGRACLRECSGDRVVGEVSDGTRRCWCERGFAPALDRSGCVPAAECPPGMPWCASCDGSGRCLSCAAPGHNIQVDQRTCAEGCGDRAAPNQGVCVCEVDAVLTRGACVSAREVARKRVAAIAGGTMAGVVVAGGLVGFLCWWFLYRGRHTGALSSTASAPLSMRGGTALVST

SEQ ID NO: 402 - protein, 625 aa, Giardia intestinalis
MLLVIFYLVLSALAIACTDKTQNCAEGRCEMVGDTEVCTQCQAGKVPIDGVCVEFGTVAEKCQKTGGQAVDDKDTACGKCLDKYFMYKGGCYDKTGTPGNTICGTGGDTAGICDTCRANYFKHPDPADTKDSCIPCGDVTGVDYNKGIANCKTCASSDTAGTENAPQTATCTECVDGFSPDPTGKTCVAVECAENCLTCTDEAADKCKSCTAETYFLGAASGGEGRCIKCDDTTGANGYRGITNCVKCTQPESAGPAVCTECAANLYVKADVGVMACVAASECGEGFFPATVGGVKKCVSCDETDNGGVETCAKCALKTPVPETGTVVTCSECDGGKKLSPLKDACLNSCPDGTYDKQNVCTPCHSSCANCTDATSAACTACYPGFVLNATAGASAGTCVQECTGKYAENCADGQCTAVVGGSKYCSKCNIGYAPVDGICVSTTARAVEGCNPGQDGTCVSCKDAYFKESGGCYQSTTYPGNKLCSSAQSGQCQRCANGQTPDSGFCPACATGCATCETTNAQQCKTCLPGRYLDSNKACKLCTETSGNTQGVDSCISCLAPTSPNTPTPVICYVTKDDGSGGNGTNKSSNLSTGAIAGIAVAVIVVVGGLVGFLCWWFICRDKA

SEQ ID NO: 403 - protein, 1075 aa, Giardia intestinalis
MLCVGVTLAVALGMACSPGGDYAVTCANDKCELVDGMEVCTECKAGGVPIDGFCWPVGSPQIITAGCTKEDGADLDDTATTCGTCSGAGHFLFMGGCYNQNTWMGRRICSETSGGECTACARADWLFENPAKSPAPGTKCILCSDANGDGKARGVENCVTCQTPGSSPGVATCGICRVGYANRGDACVQCGDGCSACSADTPTQCTACFDGKYLSTDKCVDATKCEANHYADKKTWSCKACSDIEGCTECTYNDATGKPKCTNCNGKLIRTAADGTTTCVDANQCAQNDQAGTHFLTKNSDMCLLCNDVSIEGEAANKGVEGCGTCKKADPSQNVVCTACMDGYYDSDDGPDTATCVACGENCATCVKDTKDQCTTCRPGFFLKAGAPNECVSCDDTTNGGSEGCSACSNDGEFKCTDCKANYRTEGTSDNYICRKTCEDETACGGTAGTCGTIVIQENGDFLHHCSLCGDPNTFPIDGICVKEKSGNTCANGVCTQCAAGYFLYMGGCYSAASAPGNTMCKEAPNGVCIAPSENNKYFLVPEAKNNQQSIMLCENPIGIAVDEKVYVGVEGCDTCTAPAPLTEAGMRPARCTACNSGRKPNLAGSGCFLCTVGGCSHCSANGVCEACTSEEQRPNTAGTQCISCNINGCTRCSEENKCDQCGDGYRLEGETCVQIQPSACQTLGNAGCATCDPNGGDEICLTCTKESDFLQLNKKSCKASCDGDGEIADPTSTPKVCKCDAEKGYQLQGDACVQIQPNPCQTENCQECTNRGKENEVCTECISTHYLTPTSQCVPDCTVISGYYGDADKKCKRCHDACAECVGTANNQCSACSAGRALTYADDNHPDNGGTCGDACTANENGCKACGAKIGGTDYCSKCSADSQAPLNGVCTANARAQFCTQVTEGSCTSCNDGYFLRDGGCYETTKQPGKQVCTQANGGQCQTCANGLETQDGDCSKSACHPTCATCTAASQADKCSTCLAGYYLDVSRACTPCTETSGAIQGVAGCASCTAPSGNQGPVLCYLLKGGDSTGGSTNRSGLSTGAIAGIAVAAVIVAGGLVGFLCWWFLCRGRA

SEQ ID NO: 404 - protein, 419 aa, Giardia intestinalis
MLVGLLLICITVLAKYNGRDACKLKTGVCDGPLTTAGCATCTEAGVGQTCLTCTAPSHKVRPDEKGCIAACPEGVSTDVDGFCECKNGYQPSASGETCELDACNTPNCKTCDNPKTDREVCTECNDGNYLTPTSQCVPDCTAIKGYYGDTDKKCKKCHDTCAECVGPADSQCSACPAGKSLEYGNSIYPNNGGTCGDACKTTGGSTGCKVCGSTIGEALYCSQCNNNNQAPLNGNCAANARTRFCTKMGTGACTQCAADYFLKDGGCYETISSPVSRSVVAHREGHARHVPMDCRHKMETVPSLHVILLVLRAALPVLQARVRRVPLATTRRTVAIPLLGHARGAQRRSLAASSALRHLLVQSYAWSQRQAPVEAPTRMPSPQAPSQASLWPLSSSSGASSASSAGGSSAEGRCRCTLR

SEQ ID NO: 405 - protein, 740 aa, Giardia intestinalis
MFSGFVFVGLIVQLAWAEQAKERAGVASCADDTNNCELCDVLIGDKLYCSKCKASAVGHAPIDGKCADAASKTPCKENADGKCTECTGQSFMYKGGCYQVSQEPGQTMCKTAADGKCTEAPASKSYFVIPETKRQPTGQTVVWCGDNAGVTSGGQTYKGVIGCTTCDGSKLTADASGEAVCSACGNNKIVKIAKDSATSCVTEDDCTGAEGFFVKGNLGSKTCEACAETCKTCKTEAAKCTSCKNDKPYLKKAQSQDQTGECVTEEVCKREGTHYADDSKEPKTCRTCAEGTFEACEACEKSREGAVTCRRCKSQKKVQPNKKGCIDACPPNVSVDSHGICECVEGYVPDEIGTGCKEESAPPAPPVAQCSTPGCKTCDKPKTDEEVCTECEDPKLLTPTGQCIDKCGDLGGYYEGTNDKKKKACKKCEVANCLLCNEKGKCAACKAGFYGEACAACNSACKNCSGPTAADCTECSSGRALKYDTSGAKGTCEAGCKPNASGCEKCELTVEGTTYCSKCKEAGQFPQNGVCSAAAGRAVTCATQGTGVCDKCTNGFLRMGGGCYETAKFPGKSVCADANADADTCKTPVPGYKVEAGKLVTCSEGCDTCNDANTCTKCKDGYVLITSKCTPCSAGCATCTNTASACETCSTGYYKSKNACVLCTANNAENTITGVANCASCAPPSNNQGSVLCYLMKDGGSTNKGGLSTGAIAGIVVAVVIVVGGLVGFLCWWFMCRGKA

SEQ ID NO: 406 - protein, 766 aa, Giardia intestinalis
  misc_feature (600)..(600): Xaa can be any naturally occurring amino acid
MHRQHSWAWCEAELMAGWEARPPDGPQSQRPKDASSQALAEWMTHGEQRRGRRADHRHSDRPECSGGRGPSGILHQELPRNPVDTTMLLIAFLFVSSTLAEACQPDGDHAATCQTGRCETVGSSEICTQCRAEGVPIDGFCRPVGSPQAIATGCTKGDGTALEQTAATCEKCGSEYFLFMGGCYRTGSQPGSEICTAAEGGKCTECNADNGLFKNPAATPDAGRECILCWDTMGANGYKGVDKCTLCEQPNREGAATCTECTVGTYKSLNTNECKVCDNACTTCSGEGENACTLCAGGKYLDGNSCVAKGSCGMDKYEDNASMACIACSTIDGCTRCKLGATGRPECTVCNLDKIPRTGLDGTSTCVTKGYEQCQGADKELFMKEDQLACLLCGDTKEAGNDKGVANCKTCTKSANDSPPTCTACKEGYIIKDPGNSATCEACGANCATCSQAILDTKCTKCKEGFFLAGAGEGKCISCENGNDGGYSGIAGCLSCKAPTNPGPASCDRCKIGYMLKGTTCVKVCEDEKACGGIAGACDATVIDEKGVEHHYCSYCGTDSEAPIDGKCSSAKGSNACNNGVCTQCTAGFFLYMGGCYSTXNPPGNLMCKTADGGVCTEAASDKYFAVPGAAKTGQSVLACGNPLGTAVDDKTYVGVEGCSRCTVPAQLEASGMAAATCTACGEGRKPSKSGTGCAVCSDANCRHCRVDGVCEECSSGFGLEGGKCVSTGGPNLSMGAIAGISVAVIVVVGGLVGFLCWWFICRGKA

SEQ ID NO: 407 - protein, 220 aa, Giardia intestinalis
MNYCSYCGGADDVPIDGRCVNKANANGNTECTAHKCPSCTAADYFLYMGGCYSTKKEPGNLVCTEAKDGKCIAPTSRYFAVPGAAKTGQSVLACGNPLGTTVDDKTYVGVKGCSQCTAPAQLEASGMAAATCTACGEGRKPNKSGTGCAACSDANCKHCRVDGVCEECSSGFGLEGGKCVSTGGPNLSTGAIAGISVAVVVVVGGLVGFLCWWFICRGKA

SEQ ID NO: 408 - protein, 198 aa, Giardia intestinalis
MFDKLIFASLALQLAWASQTASTAKANPTPCDPKNPDQTHCAADGCNVEIGGQTFCSKCTGDNVPVDGECTAKGGAAMCTAGTDDKAGTCTKCAGAHSLYMGGCYEHCPYGPGDAANVCGDAPAGCNIPNCKSCPDGTCTECNDGFVLGDGNKCVASSVNKSGGLSTGAIAGISVAVVIVVGGLVGFLCWWFLCRGKA

SEQ ID NO: 409 - protein, 143 aa, Giardia intestinalis
MLLLALCFALSTLAVQCRGSQHSSCAAGQCKVVRGVEVCTRCRAGHVLVNGVCTGNAAGNEADSDCQVEHCDRCVSGDDTKCEACSAGFDLDDNTKQCVSSSINKSSGGLSTGAIAGIAVAVVIVVGGLIGFLCWWFLCRGKA

SEQ ID NO: 410 - protein, 807 aa, Giardia intestinalis
MELASLPLTLTCLLAVYFSEKASTYHNGFGYSCKDAVLNCLQDKCLINLTMFLCTECASGYVPINGKCFSIADQLTTKTACVKSPMGGWCMECGDEYFLFYGGCYSLDGTWKKTICDRAENGVCKECGKGSIDYPALVFTNPNTTSLERCIHCGDPIGFGGYSGVYNCQHCSQPRLSGKVEADCGACSDSDVCPFDYRCKPASGIAAFGYCDYCPKAYIWSSDACYTIGSLTGDTICLPRNVIDIQGQSLCIQCANSSEVPRNGRCRPSSGFEDVCMKDPKGGKCESCRDSNAIKYFLFYGSCYQFGGSAENLIGSYICQKVQGNICIACNSSTKEVFTKNNGCWRCGDTANGGIAGCQRCEMKGDALQCLECRDLYLSLDKKSCMVSCPDGQVGAFDSSSKSFVCACDDGLYLKDGGCVKCTIENCAECDEAKCSKCRYGYTLSNDQCAETKCKDPNCDACENRDVCTRCSNDHSLDQNGLCVKDCLSSAGYYKATVGDVLRCVACTLGGCAVCESADKCTTCRDGFYPNGSGGCKACNPACATCSGPEAGDCTSCPAKRRLQYSDGIKGSCVSQCVQDGSCAACGLTIDGTSYCSQCVKSTEYPRNGVCASTGSRATGTTCTNVVGGRRVVCGSSSFRLNGGCYTSKLLPGKTVCSGERDGWCENVAAGYGITYNGTLLTCPEHCKVCTDGSCSSCNSGFYLEKGVCNACPEGCATCPHGKACFDCLAGYYFSENTCKACHKAVPKCSLCAVPEGATQPVCLEYGRSLRPTLSAGAISGITIGAVLVIGTVTAVLVWLLVFRKKS

SEQ ID NO: 411 - protein, 943 aa, Giardia intestinalis
MCWSSLFALLVAVMHAHDEACAYCLRDKCLKTRYGSVCTYCETGYVPLEGRCTAMDVSFCLVESESRGSCSQCAYGYKSFLNGCYLVPLFEKLGKELDNSVSVPSALYISTHVVLNGQILFTGCFMDNELPINGVCAEDTANWCTQSGETDFSYGTSCLQCTGTDVFYFKGGCYSTKTEPGSLICKTASGGICTTCNTDSHYVFANPSTGTKTEQCISCGDGYGANGYSGVENCKTCAAPSGNSNMATCSACPDGYKFNVAQTRCFTCTLQGCLNCDSYESCEHCNTDFYIADQSYSKICATTCPTGTFPFVNSTGYKKCFSCSTSDGSDPIAVERIPGCETCTVNSSNLLTCSACLQGYQLTSTGCKQVCADVSGKCGSNACTVVIGSISYCSDCSGANNYAPINGVCEYVTMNDKSGCRKEETITGSCSQCGEGYFLHMQGCYKADQAPGNLVCSSVGTGSRSSGNAGAGLCSVCGPGYRTKRGRCISCNSQHCLEYIPNTCVCTLCEDNVLLIQGECVPFPSSGCKVPYCALCEKKLEVCTRCEGSYYITPLHGCIKDCGDLLGYHNDADLGRCVRCRIKNCYKCYDSVRCLECSTGYGLTDDQQCARCPENCFACAHYNQCTTCKSGYILNDFNVCESENEYKVDCKHADAKYIKYELARHIKGSVRQRLMASMCSECNAGKVPINGKCVSVSAKTLSCVSGTGENTGKCTHCVSGSNSNSAFLYSGGCYDSTTGVGKSLCTSVGDNGLCARCPRGGFMLDTSRNECVPCPMNCMKCNSSGCLRCDPGWLLIESNCVPCKKGCLECSGSADKCTSCITGYYVAGAVTSSSKNEGACRSCDDTREVDGWKGVHGCTLCTPPVFAGEVLCLSKEVIDDSVTRPLSSGAIAGISIVILVVVAAIVGVLVWRFVYKKKSSKHIKMVDMDASINTSQYMSSSHV

SEQ ID NO: 412 - protein, 450 aa, Giardia intestinalis
MFRKFSVAIFILQLAWAIQVADGCRRATSGNVSTHGMYSPTIENNKYCSQCNHGKGNSSLINREYTANNTTHSKGTKGKLTKCNRNLYLKTESGVTSCVAGEDCGSGSFPTVDSAGNKKCIPCNDSANGGIEHCSECSLLAPTSRSATTLIKCSKCSVNMLSPLGDGCLRECPAGTYDSSDVCALCHESCASCNNNAEPTSCTTCYSGFVLSHTNGPIGKCIPECTGEYIENCDDGQCTAIVGTSTYCSKCKTGYVPVDGICVSVTTREVTECIPNNDGTCKSCKGTYFLQSGGCYQSTTYPGMTLCEKAQDGKCITCTNSQKPDAQGSCPLCELGCELCSASKATTCWTCFPGYYQSGTKCFKCTDNSNEGGRTITGVPNCLSCEPPDNGSGPVTCYVTQQSDKNNSRDSLNKNALSSGAITGISVVAILIIGGVVGFLCWWFLCHKKK

SEQ ID NO: 413 - protein, 744 aa, Giardia intestinalis
MFSGFVFVGLIVQLAWTEQVAERAREAQCADNTNNCELCDVLIGDKLYCSKCKASAVGHAPIDGKCADAASKTPCKENAEGKCTECTGQSFMYKGGCYQVSQEPGQTMCKTAADGKCTEAPASKSYFVIPETKRQPTGQTVVWCGDNAGVTSGGQTYKGVIGCTTCDGSKLTADASGEAVCSACGDNKIVKIAKDSATSCVTEDDCTGAEGFFVKGNLGSKTCEACAETCKTCKTEAAKCTSCKNDKPYLKKAQSQDQTGECVTEEVCKREGTHYADDSKEPKTCRTCAEGTFEACEACEKSREGAVTCRRCKSQKKVQPNKKGCIDACPPNVSVDSHGICECVKGYVPDEIGTGCKEESAPPAPPVAQCSTPGCKACDKPKAGEEVCTECEGAKALTPTGQCIDKCGDLGGYYEGTNDKKKKACKKCEVANCLLCNQEGKCATCKAGFYGEACAACNSACKNCSGPTAADCTECSSGRALKYDATGAKGTCEAGCKPNASGCEKCELTVEGTTYCSKCKEAGQFPQNGVCSAAAGRAVTCATQGTGVCDKCTNGFLRMGGGCYETAKFPGKSVCREVVSDGDTCKTEDLGYHIDNNALMVCSAGCKTCTSNTVCTACMDGYAKTGNSCTKCAAGCATCTNTASACDTCSTGYYKSGSICVLCTANNADSTITGVANCASCAPPSNNQGPVLCYLMKGNDDTDENTNKNAFSTGAIAGISVAVIVVVGGLVGFLCWWFLCRRKA

SEQ ID NO: 414 - protein, 580 aa, Giardia intestinalis
MLLIVFYFVLSAFAADCNGGEASVNCEGASCEMIGDTQICTSCETGFVPINGRCQTKDGVTDKCTDAGGTNAADQTCKKCKGQTFMHKGGCYDKEGEVGRTICKTPGNTEGVCDGCQDGYFKNSSPNDTKDSCVACTPNCIKCSTADNNKCSKCVDGYFVGAASGSEGQCIKCDDTAGADSYKGVTGCNKCKTPTVVGEALCDECSNGLYLKIVGGKTFCVSEDACKEGTTHFPAIDSTNSNKKICVTCDTTANGGIEDCEKCSLKAASAKAAPIITCSKCKTKKLSPLNDACLENCPAGTYPENNDSISVCVPCHNSCVSCENSNAETSCTACYPGSVLSRTTATAGRCIPECTGEFMAHCAAGQCDGVVGGSKYCKKCDNGYVPINGICTAVGAAGRDASMCTAGDGVCTACKNDYALLSGGCYNTNKVPGNLVCETADGTGKCTMCAANNKKPSGDSCPTCSDGCAKCNDSSACTECLPGYYKGTSQCFKCTANSDNGIEGVENCISCAVPISNFGPVTCYVKKDGTSGGGGSSGGGSTNKSGLSTGAIAGIAVAAIVVVGGLVGFLCWWFLCRGKA

SEQ ID NO: 415 - protein, 503 aa, Giardia intestinalis
MLLLVLCFALSTLAVQCRGSQHSSCAAGQCKVVRGVEVCTRCRAGHVLVNGVCTGNSAGNEAVSECRVQNCAECKADDPTKCERCEAGFTANVEQTQCNQDQAPECRVQNCAECKADDPTKCERCEAGFTANVEQTQCNQDQAPECRVQNCAECKADDPTKCERCEAGFTANVEQTQCNQDPEQQCNTPNCKACDNPRTDREVCTECSEGNYLTPTKQCTQSCGTLGGYYNGDKVCEPCDPSCAACATKGPTKCTLCPPGKRLQYTDEGAPQGGGSCVDECRPEGGAGGCETCGATIGGTKYCSKCSTSAEVPVNGVCTADNARASACKVKDGKGGCTTCDNGYFLQDGGCYKLGRQPGEQICTTASSTGKCETCANSLRPTDGVCPSCHPTCKTCSAADIANACTTCATGYYMLGLGPATCTSCERDSGNVKGVSGCLSCAPPSGNTGSVLCYLTKDDGTGGSVNKSGLSTGAIAGIAVAAIVVVGGLVGFLCWWFLCRGKA

SEQ ID NO: 416 - protein, 467 aa, Giardia intestinalis
MLVGLLLVCAAIWANCAAGCKTCNPGDQACTECTDSSHNIQVDGKSCDANCPQNSAANDQKVCVCSADYSPVVGENRCERTPSVGCAAGCKTCNPGDQACTECTDSSHNIQVDGKSCDANCPQNSAANDQKVCVCSADYSPVVGENRCERTPSVGCNTPNCKACDNPKTDREVCTECNDNSYLTPTSQCVKDCTTISGYYGDTNEKKCRACNPECAECVGPANNQCSACPAGKSLEYGNSMYPNNGGTCGDACKTTGGSTGCKVCGSTIGETLYCSQCNNNDQAPLNGNCAVNTRAAFCATITSGACTKCNEGYFLKDGGCYQTDRQPGKQVCGTAGQGVCTKCANGLPADNGDCSGKKCHESCSTCNGIDEASCLICATGYYKENGSDSTAGPCKRCSERIPSCKQCTSPSAGSVICLESEAGTGGNVNKSGLSTGAIAGIAVAVIIVVGGLVGFLCWWFLCRGKA

SEQ ID NO: 417 - protein, 416 aa, Giardia intestinalis
MAWSGQRPLIFPKDTAKKDHYLCGDAAPGARRGASGWTGGPVAKAAAEHSGRCTEVVEKSSPVKILSCRCVCKPTFYNSSGTCTKCADSCAACKDGTSTGCQRCSPGKILSFPIASSESADCVSQCVAGSECAGCGLTIDGSRYCTRCKDSSMYPFNGVCILDAKKDAYCTAKANGVCTACSEAAFLMSGGATQQHTIQATPSAMQRRVASARHPGRGTGYQPMESCSPRPGVRLPAHGCAERGLAGHDGLPIARCPRNRDVLAAITRGGAGSAWCLLAHSTARRASSTVAPAHVQEAPGSALGADPASTGVAALVPAERAAARPCPARLRQPVARVAQLAPHTALRRGGVAILPGARRRPDGYPRFGAHPAAGSSRVTGASCWFAQGRPSSSSAQASPRGRPTDGLPRRCLAPRA

SEQ ID NO: 418 - protein, 675 aa, Giardia intestinalis
MLLIVFYFVLSVLTAECTQRDNQEKCATGKCDMVSTTEVCTKCKTPGNVPIDGVCVEASTASGKCEKAVGGAVNREDTVCGKCLDNYFMYRGGCYLAGAAGPGIGTKMCETAESGKCTAAAKIKNFFVPPTDTDATHDSVVWCGDAAGLQLGGKTYTGVADCATCDAPTSADPSGTKAATCHACRGEKLVKTVGDVTSCVTEEDCAGAEGFFVNNRDGKKCSACADTCKTCKTAADQCTSCKPDKPYLKKDDGSETGTCVDKATCPTTSTHYIDEESKTCTTCTSGGAKDCKTCEKSSGGAVCKECPDSDKTIFGLNKKSCVAQCPVNSTPKATKQSIQVCMCEEGFQPNAESTECQPTSKCVTPGCKTCDNEGTDKEVCTACLEGKYLTPTNQCIDHCITIAGYYDGTDDNGKKTCKKCNSACAECVGAASNQCSACPARRMLQYTDASTPAHGGTCVDQCSVSTTTEGCAECGARIGGTDYCSKCKGSQVPINGVCAANPSARAAACTSDGQGACTSCTGDYFLRDGGCYKTDRLPGKSICTQAANGQCNKCANDLVVSGGNCGECHPTCATCSAAGAADKCKTCVTGYYKTSDSEGSCKKCSEGLAGCRQCTASIGGKFICLEMGDGTTDDGSTNRSGLTTGAIAGIAVAVVIVVGGLVGFLCWWFLCRGKA

SEQ ID NO: 419 - protein, 745 aa, Giardia intestinalis
MFSGFVFVGLIVQLAWTEQVTCTVETETGQCKENMCIAIGADNVCTDCGKAGEVPINGKCVAFNTANDKCKKADNQQLDGTDTTCGKCEGTTFMYKGGCYETTGTPGQTMCKTAADGKCTEAPDSKSYFVIPEANRQPTGQTVVWCGDNAGVTSGGQTYKGVIGCTKCDGSKLTADASGEAVCSACGDNKIVKIAKNLATSCVTEGECTGAEGFFVKGEQDPKTCEACAETCKTCKEADNKCTSCNEGTPYLKKDVGDTGTCVDANGCTSVKTHYIDDTDDPVSGKTCKTCVSGGAVDCETCVKEGDGAICKTCPSAGNTLFGLNKKSCVAQCPDHSEADDDKICKCDSGYMLNETGDGCKEGSAPAPVECPIEGCKTCSTDKKACEECEASKYLTPTKVCVSDCAAIPGYYNGANDGKSACKKCVVENCVVCTGDGTCEMCTDGFFGPSCSQCHETCKTCNGGSESDKCTSCKAGSALAYGSTGSTGTCGAECTTGMGAGKCKECGLTVEGTRYCSRCSEDKEYPQNGVCAKASARTSSCQDTNIAGGVCSTCENGFFRMNGGCYKIDQYPGKAVCAQIESPVGTCEKAADGYKLDAGVLIICPEGCKECANGSACDVCKDGYVKLSGAQTCTKCDTSCKTCKTATTKCVDCSAGYYKTVLEEGACTSCEHSNNGVTGVANCASCAPPSNNQGSVLCYLMKDGGSTNKGGLSTGAIAGIVVAVVIVVGGLVGFLCWWFMCRGKA

SEQ ID NO: 420 - protein, 805 aa, Giardia intestinalis
MMQILLPLTVACLLVGVFSEEASIYRNGFGYSCKDKAPKCLPNKCVVDVTSQSLCTECESGYVPINGKCVPAADETVSKAGCAGSSQGGWCTKCGDDHFLFYGGCYNSSLEWTKIICERAEKGLCTKCANKGYRLTLVFTNPNTKAPERCILCGDTVGFGGYSGVYGCLFCSPPRTKQGIVATCYGCSDYEDACVYDYRCKRITEGTYTGRCIYCPNTHLWSFFACYARDTPVGASICLPKDTMEVSGQVLCSRCANPSEVPVNGLCTPVVELKGLCVKDPKEGKCTSCRDRTGGQTFLFYGGCYSLHGNSHQVGPQLCQKAQDNVCIACNSSIKEVFTKDSRCWRCGDTANGGIAGCQRCEMKGDALQCLECRDLYLSLDKKSCLAGCPRGQRGVRDPSSSVHSCTCDDGFYLKDGGCVKCAAENCAECDEARCSKCRYGYTLSDSRCAETKCKDPNCDTCESRDVCTRCAGDHSLDQNGLCVKDCLGSASYYKAIVGDVSRCVACTLDGCAVCESADRCKTCRDGFYLESQERCKPCSSACATCSGPEAGDCTSCPAKRRLQYSDDSKGSCVPQCVKDGSCAECGLTIDGTSYCSQCVKSTEYPRNGVCAPTSSRATGITCTNAFGGQCIVCGSSSFRLNGGCYTSKLLPGKTVCSGERDGWCENVTAGYGMTYNGMLLTCPKNCAVCSGGICSVCNNGFYPEKGMCNACPEGCATCPHGKACFDCLAGYYFSGSMCKACHKAVPKCSLCTVPEGATQPVCLEYGHVSRLSAGAISGITISVVLVVGAVTAILVWLLVFRKKN

SEQ ID NO: 421 - protein, 426 aa, Giardia intestinalis
MGEGIVTDNSMFAKLIFTSLILQLAAALRPIERRSGNACTGLGSAGCQTCSGSGSNEICLTCKDKVQFITVNKKAARPPATQQERFQIQITRRPACVIRPVDTHSRVTGRAPRGSLATRATPPTVKRVTILKLTGKSALSVTMTTTSPQQTSVYLTAQPSRDTNEKKCKACNPECAECVGPANSQCSACPAGKALTYGDSTYPNLGGTCGDACTVDKNGCKVCGARIGGTDYCSQCSGTQVPISGVCVENASGRAALCTAKGDGTCASCAAGDLLKDGGCYKTDRLPGRSICTTASNNKCTKCANGLNADGNGVCGECHSTCATCSAAGAADKCRTCATGYYKENADNSADGTCKRCSEKIPGCKQCTSSSADSIICLESEAGTGGSVNKSGLSTGAIAGIAVAVVIVVGGLVGFLCWWFLCRGKA

SEQ ID NO: 422 - protein, 677 aa, Giardia intestinalis
MLLIALLFVSSTLAEACQPDGDHAATCTSAKCEVVGSSEICTQCKTGGVPIDGFCRPVGSPQVITAGCTRGDGTALEQTASTCEKCGSGYFLFMGGCYRTESQAGSEICTAARDGKCTTCKTGGGVFQSPANPMTPGNECVLCSDVTPRDGVMGVASCYTCTAPGGGSGAATCTTCQSGYYKESTECKKCVAGCIDCNAASQCTTCEDGKYLKDGNSCVDPSGCTGANYPDPESRTCKASGIGSCTNCVYNATVNKPQCTACDGGKKVKTAVDGTTTCIDLSSGCEDSNHFKADGDAGCVLCSDTSGDNPAENKGLEGCSACTKQPSNPPICTGCLPGYYDSAPSTFKCKPCDGNCATCGSAGKDKCDTCKPGFFLKVSGTPGECFPCDDTANGGSEGCGVCSSNNGFECTGCKPNYKQTGARSGSVTCTKVCEDETACGGTAGACDATVVDENGTTKHYCSFCGESGKFPIDGKCTNVNAGNDGCANGVCKSCTTGYFLYMGGCYKYDAALGNHMCSTSTAPGVCSTPNPNKQFFVVPEAAATQQSVLACGNPLGTAVGDKTYVGVEGCSQCTAPAQLDAPGMAAATCTACGEGRKPNKSGIGCVACSVENCKHCRVDGVCEECSSGFSLEGAKCVSTGGPNLSTGAIAGISVAAIVVVGGLVGFLCWWFICRGKA

SEQ ID NO: 423 - protein, 480 aa, Giardia intestinalis
MLLKITLTFAAVLASCQEGAESTNCKTGRCTDIEGTPYCSECAVPTEAPVNGECKEVSADPFCTGNGAGACSACKGASFMYKGGCYEQAKPPGSDLCKSTNNAGVCTAPNVSGKYFVPPDTDASHQSIVGCGDTSGMRYQPSDGIDKAYKGEANCETCTAPQQVADNTGTATATCTKCAGSNIVKTDTDGTTCIPESECPTANGFFVEDPGSGNQKKCNPCSPNCLSCTSAAEATCASCTAETHFLAAETGQPGKCVSCGDAVTGSGDWKGVSGCAKCTKPEVAGAATCTECTSDYLKTDAGTTSCVQKGQCNGGYFPNDNVDGKKQCIPCGTADHGGVAGCTACSPLQPASMVTAVLVKCSACAPNSKPNVAGTGCFTCSIDGCDNCSENGVCEKCGNAKKVSPGKNSCVEQCPENSIEKESVCVCNSGYDPDSAGTGCVTVSINLSTGAIAGISVAAIVVVGGLVGFLCWWFICRGKA

SEQ ID NO: 424 - protein, 658 aa, Giardia intestinalis
MLLVAFYFVLNTVAEVCTGDQLAACGDSQCETLNSVQICFQCRTEGNVPIDGVCTPKNEVGDKCKKAGGGALDETAKVCGECSGNYFLHKGGCYSVTTDKPGHALCTATENGVCTQGADGYFAVPGAPKTGESVVACNNNAGTSINGNMYKGVQNCATCQPPAGPAAVREDTIAVCKSCLEGFFHTDERTCTACGGTNCAICTIGATEKMCTKCKITNDEQYLKKDIDSETGECVSAATCIGNAKYYVDDTVDPTNGKTCKTCASAGTIDCTTCEKGVDGIVVCKTCETEQKTKFGLGKKSCVEACPENSTESDEEGKKVCKCNTDFKPSEDFTKCIVDSACKTPYCKTCSNDVCTMCASGYYLTPTSQCISDCTTIKGYYGDSRDKKCKGCNSECTECVGAANTQCSACRAGKMLQYTKPNTPIEGGTCVDQCTVSSEAAGCETCGAKIGGTDYCSKCKEEQVPINGVCAENSAASRANICTSNNNGGCTGCADGYFLFANGCYKIGQQPGKQICAQANGSGECQKCANGLQAQGGDCSAYMCHPTCATCSAANQENKCTTCATGYYKTTQEGACTSCESDSNGVTGVRNCLNCAPPSTGSGSVLCYLMKGGDSTGGSTNRSGLSTGAIAGIAVAAIVVVGGLVGFLCWWFLCRGKA

SEQ ID NO: 425 - protein, 922 aa, Giardia intestinalis
MYCGACSIEGDVPINGVCVAAGAESSGNTCDKGVCTACTAGYFFHYGSCYKFGESPGSIVCPNQSDTTGSVCGSCGPKFVKNPNASSSATSCLACYGLDGTLFCDECRISVLTGEGAKPTLCTRCKSGHVPIDGRCVSAYSATAALAGCSDVSTRGLCETRSSGYMLFYGSCYLIDGLCIADKGSHTCADGVCTAYDTTTTSIDNSKVFLFYNGCYTQDRSSIGGYICSHASGGMCTECNVGAQGSYVFTNPDISAAERCILCSDTTGFGGYRGVSECHSCAQPVGSGVATALCTKCRSPEQGDDLAPIDHQCQAKGPHDCRAGVCLSCYKTHLLHQSGCYSRHSTTGTAVCAAANQYVLDNVTICGECADASYAPINGACTRVQGGTADAEPHDCTQGRDKGLCTDCAGSAESFLFYGGCYGKGSGTGAKLCSAVASGVCTEWRTQFDFIFSKDGKSGGYLCGDAENGGISGCATCSYGDGALTCTRCSSGYLGVDGRSCSEGCGDGAQGVCAGTAGGSEPAGGACRCVCKPGLYNSSGACTSCADSCAVCKEGVPDGCQRCKPGKVLEPSVVARETARCVDECTAGGECAECAIAIDGSRYCTRCRDPSMYPLNGVCLAGAREDPYCTSRGDGVCTACAEGAFLMSGGCYRTGVYPGSVICSVQSGGRCKETKKGYGMSDDGELLQCDPTCLECKAPGPGRCTRCPPGRLLRRAPAAATGSCIEPGACADGYYADGDACLPCVVPGCRACGHTSFCTECAGELFVGLDGRACLRECSGDRVVGEASGGTRRCWCERGFVPAPDRSGCVPVTGCSPDMPWCASCDESGRCLSCAAPGHNIQVDQRTCAEGCGDRAAPDQGVCVCETGTVLDKDACVPINALTGRKMMVVTTSAAAAVLVISVLVGFLCWWFICRGKRRCYR

SEQ ID NO: 426 - protein, 683 aa, Giardia intestinalis
MLLVVFYFVLNAFAAPCDPDGNHLTTCAHEKCEKVNAFEVCTECKAGGVPIDGFCRPIGSPQVITAGCTKGDGTALEGTATTCGKCGSGYFLFTGSCYKTGSSPSDEICTTAEGGTCTVCNTANGLFKNPAAAPDAGRECLFCWDTAEINGITGVVGCSECSHIGTSGPVTCSACQDGYFLDKAKNTCTQCTSPCRTCTATGSAACTSCIVGNYLKGNQCVEEAHCTNAEYPDKKSGECKACNIIAGCTTCAYDDKLNGPKCSNCGSKIIKTEVDGTTTCVEAAGCAANGVAGSHFLTADNQKCFLCSDATTDASTLGNKGIANCKTCTKTESGSNPTCSACLDGYFFEGDSCTKKCADNCATCSAETAEDKCLTCKAGFFLVEATKPAGRCIPCDSTQNGGISGCAECTGTAGSLKCTQCKPDYAPIELGCQRSCEDVTGCGGTAGACDATVVDGSGITKHYCSFCGESSKFPIDGVCVSDTKSNTCGNHICTACTTGYFLYMGGCYDVSKAPGNYMCKIVGKEGICTEAASDKYFVVPGATSTEQSVLACANPLGTLAGGNAYVGVDGCSTCTAPAGRNDGGMAVATCTACGEGKKPNKSGNGCVLCSVKDCKSCKADEKCEECSSGFSLENDKCVSTGASGGNRSGLSTGAIAGIAVAAVIIVGGLVGFLCWWFICRGKA

SEQ ID NO: 427 - protein, 722 aa, Giardia intestinalis
MFGRLLFAGAVLQLARAVCEADGSGGAGSCKTCGVTIGGSEYCGECNDGTNYAPVDGVCADAGQAPASTFCPQHDAGKCTQCESTSFKYKDGCYQPNDGKPGQTLCLVASGGVCTEAAPGYFVPTGAVNTEQSVVACSDTTGVAIAAGGSTQKGVADCAECSAPDAAPGARADKVATCTKCGASKYLKDNGCIDKAQCDPDSTNRFVAVDDPENGNRCVSCSDNPNGGVTGCDTCSYDEQPKRIRCTKCSGNKYLKTTTDGITTCVEQNACTPDSFPVEDTQNGNKCVSCSDANNGGIDKCTACAPIGTGRAAIAVTCTACAAGYKPSADKTTCEAVTNCKTPGCQTCNNEGKENEVCAECASGAYLTPTSQCIDSCDKLGNYYGATEGAKQTCKECAVPNCKTCNNQGQCQICKDGSYKNGDTCSLCHESCKTCTAGTANDCTECPTGRALKYGGDGAKGTCGDGCTTGQGSGACKTCGLTIDGASYCSECAVDTEYPQNGVCASATARAAATCKTGNVAKGACNSCTNGFLRMNGGCYETTKFPGKSVCTTTPGTDTCTSMASGYYIDGSNNLVVCSDGCADCTTPSTCTTCKDGYTKIGSGQTCTKCDPSCETCSGAATTCKACATGYYKTASGEGVCTSCESDSNGVTGVKGCMNCAPPSSSTGPVLCYLMKDDSTGGSTNRGGLSTGAIAGISVAAVVVVGGLVGFLCWWFLCRGKA

SEQ ID NO: 428 - protein, 818 aa, Giardia intestinalis
MMQTLLPLTVACLLVGVFSEEASIYRNGFGYSCNDKVPKCLPNKCITDIILQFLCTECESEYVPINGRCVLTTNETVSKAGCAGSSQGGWCTKCGDDHFLFYGGCYDSSLEWTKIICERAEKGLCTKCANNGYRLTLVFTNPNTTAPERCIYCGDPIGFGGYSGVYNCQNCRQPRLPGTTEADCYGCLQQEMCSFDYRCKPAGDIASFGYCTICPKTHVWSDFACYAIGGATGDSVCLLENIIEIQNRSLCTRCTNPLEAPQNGRCLSISKFDNVCVKDPEKGQCTSCQDRDAEKYFLFYGGCLRKDTSYQIGSQICQEVRDNVCTMCNSSTEEVFTGNNRCWRCGDSANGGIDGCQRCKVGSDGLQCLECRDLYLSLDKKSCLAGCPRGQRGVRDPSSSVHSCTCDDGLYLKDGGCVRCTVENCAECDEAKCSKCRYGYTLSDNRCAETKCKDPNCDTCESRDVCTRCAGDHSLDQNGLCVKDCLSSAGYYKATVGDVSRCVACTLGGCAVCESADKCTTCRDGFYLEGQERCKPCSSECATCSGPEAGDCTSCPAGKRLQYSDGTKGSCVSQCVQDGSCAECGLTIDGTSYCSQCVKSTEYPRNGVCAPTSSRATGITCTNAFGGQCITCGPSSFRLSGGCYTSRLLPGKAVCTTESDGWCDTTVAGYEITHNGALRACPKNCAVCGGGVCSACNSGFYPERGACRACSKGCATCPHGRACFDCLAGYYFSGSTCKACHKAVPRCSLCAVPEGATQPVCLEYGHVSRLSAGAISGITIGAVLVIGAVTAVLVWLLVFRKRAGVPPLYKQSTVASTQ

SEQ ID NO: 429 - protein, 862 aa, Giardia intestinalis
MFGRLLFAGAVLQLARTATCTGSNSAQSTKCVQEKCNVWIGGKDYCSQCSTDAELLIDGGCVPTTSDLAKKCITDNKGKCSSCGDGYFLHRGGCYQFGGEVGKLICSDPAPSLPGTTLPAGACTTCGSGYFKNPAESAANTPPCIACNDTAGDSGNTGLVGCSTCDPPISGQATCTACLEGFYGTTSCQQCDESCAACIEQGISKCTKCKSASGKEYLKITDSQTASGECVPQGSCIGTHFPVIAEKKCYFCNTIEKGGKPGCKTCNGDSSSITCSACLDGFFGSEECTPCDISCLTCEAAGKENCKSCSAETHFLASTDTKGACVSCSTVQAAWSGVANCAKCDRPASSDVSAVCKECNENFYLYTPPALGKNKLPPSCVITCPAGYFGHTATSSGIRTCQPCATANGLSPDVTGIAGCKKCTYTDSLQCDECEQGKKPSLDKTKCNICIAANCATCDSEGTCQGCNSGFLLNNGNCVESTCKTENCEMCDDAKTENEVCTVCVSKYYLTPTNQCIDDCTKIGNYYGVTEKTRGICNICTVANCKECENTGTCRACNDGFYKYGEECKPCDSSCKACSGEGGTKCTECPVGKVLEYIGTEGQCIEQCVVNDDQASGSCKKCELDIGGTKYCSQCSRQNEYPQNGICTPSTQRASSCQTGPQNGMCATCADTFLKMNGGCYETTKFPGRSVCTNAPTGGTCTSPLPGYYFNGGALTVCVEGCKTCTNNVACDTCKDGYVKLGGVQACTKCDPSCETCSGAATTCKACATGYYKTASGEGVCTSCESDSNGVTGVKGCMNCAPPSSSTGPVLCYLMKDDSTGGSTNRGGLSTGAIAGIAVAVVVVVGGLVGFLCWWFLCRGKA

SEQ ID NO: 430 - protein, 987 aa, Giardia intestinalis
MLITFLIVLNTFAADCQQDRDHAAICKSGSCELIDGMEVCTQCKAGGVPIDGFCRPVGSPRVITAGCTGSEGAPLDKAATTCGRCSGANHFLFMGGCYNQKMGIGGTICTAASGGECTACAKAGWLFENPSGTPAPGTKCILCSDVNGDGKAKGVENCAECTKPADSPGVATCDICRIGYVNKSNVCVQCGDGCYECLDNNQQTCTACFDGKYLSTDKCVDANRCGDGNYADPKTNECKACITAECATCIYNTIIDREQCIVCNNDPTKMVKIEANGETTCVDKATCATDNTPGSHFLSTNSQKCILCSDNSDADNQGIDGCSTCKKKTPTDAFVCTECLAGYIKKGSDSVTCEPCGANCATCTQIGDDQCTACKPGYFLKSGRSPSECIPCDGEGGTEGCGICSNDSNTFKCTDCKPNYHKRAGGGSAVTCEKFCEDSTACGGTAGTCGAIVVQNTGDFLHYCSLCGDPNTFPIDGKCVDNAQGNTCANGVCTQCAAGYFLYMGGCYSVTSAPGNLMCKTAEGGKCTAPNENNKYFLVPGAASNQQSVMACENPLGTAVGEKAYVGVEGCDTCTAPAPLTEAGMRPARCTTCNLEVDKPNLAGSGCFRCTVDGCSHCSANEVCEACTNKEQRPNTAGTQCISCNINGCTRCSEENKCDQCGDGYRLEGETCVQIQPNPCKTENCQECTNRGKENEVCTKCISTHYLTPTSQCVKDCTIISGYYGDADKKCKRCHDACAECVGPANNQCSACPAGRSLAYSNSIYPDNGGTCGDACVVDKNGCKVCGAKIGGTDYCSQCSDATQAPLNGNCAANTRAAFCTKMSTGACTQCENNYFLKDGGCYQTDRQPGKQVCSGAQGGNGKCQTCANGLAASDGNCGACHSTCATCSAAGAADKCKTCATGYYKTSDNEGSCRKCSEGLVGCRQCTASATAFVCLEMSDNTSGNVNKSGLSTGAIAGITAVAVIVVGGLVSFLCWWFIYRGKART

SEQ ID NO: 431 - protein, 491 aa, Giardia intestinalis
MLVGLLLICTTVLAKYNGRDVCEKSSNTECAQGLKDAGCLTCTEAGHDQTCLTCSGGQKVLLDGTSCGADCPENSAANPSVCVCNPGYNLNSGKTACEKSSNTECAQGLKDAGCLTCTEAGHDQTCLTCSGGQKVLLDGTSCGADCPENSAANPSVCVCNPGYNLNSGKTACEKSSNTECSTPNCKACDNPKTDREVCTECNDNSYLTPTSQCVPDCTAIKGYYGDTDKKCKKCHDTCTECVGPANSQCSACPASKALTYSDSAYPDRGGTCGDACKTTEGSTGCKVCGSTIGETLYCSQCNNNDQAPLNGNCAANSRTAFCTTVSDGACTQCAAGYFLKDGGCYETNKQPGKQVCSSAQGGACQTCANGLQAQNGDCSKSACHPTCATCSAPSTASSCKTCAAGYYKENGNDSTAGPCKRCSEKIPGCKQCTSSSTGSVVCLESEAGTGGSTNKNALTTGAIAGIAVAVVIVVGGLVGFLCWWFLCRGKA

SEQ ID NO: 432 - protein, 623 aa, Giardia intestinalis
MFDTFLFTAIILQLAWTEREREVVKAVQCPEAGDSPATTQCKQGKCIAIGADNVCTDCAFTDEVPVNGECRAADTTTCKTGGQSGVCTECATTANIFMYKGGCYTTSEAPGQTICTAADSGKCTSAGTGYFIIPAEDTDASHQSVVSCGDAEGAAVNNDKTYKGVKDCAECTISGSSAVATCSKCATGVLYTSSEKETSCPAACPEGYFVHIAKSTNIKTCQLCSDPTGGLDPAVVGVAGCVKCTYDNSKVTCEECDQGKYLKVEGGATSCVDAQDCGKGFFMTTHGGVKKCVKCSDANNGGIENCEECALKGGAARAGAEITCTKCSSNKLSPLGDACLADCPAGTYDDSSICKPCHESCASCNANAEATACTACYPGYVLNRDETNTKGTCIKECTGDLVAYCKSGGCTLDVGGSKYCDQCEDGYAPVDGICTKVSSTAKDASGCKASGGKCTACSGNYALISGGCYDTQKLPGMSICTSANTGHCTMCVTSDADPQGKPCPTCPAGCAKCAGDAGSQTCSECFSGYYLSTDKCFRCNVGNGGNIQGVPNCISCKAPSSPSAPTPVTCYVTQQRTDDGTGGSTNKSGLSTGAIAGIAVAVVVVVGGLVGFLCWWFICRGRA

SEQ ID NO: 433 - protein, 778 aa, Giardia intestinalis
MLFAVLYLALGTLAAPCQPDGDHVATCQTGKCETVGGAEICTECKAGGVPIDGFCWPASSPSAALAGCVPGASSGVCTRCSSEGHFLFMGGCFKKGNASSQTLGDSICETAQDGRCTKCKTDGNVFQNKADSPALGSECILCSDTTGANGNTGADKCLKCTSPAGSTGAATCKMCEEGYFLNTDGACEKCNSSCLTCSGGGDTKCISCKANTYLLANKCVQNNNCGSGKYADPRSNECVDCGIDGCEACEYSAVIEGPKCTACNGSNNLVREEADETTTCVDDTGCVKGSTHIVDNTNTKKCLRCGNNAEGGILGCDTCSSKAACTKCQDGYVKKALDNTCEACGNNCATCTTKGQCDSCLLGFFHDTGAHSCTACASNCETCTEANNPNRCTTCMPGFFPIDAADSQGKKCVACDSIENKGLEGCSACSNSGGFKCTDCKVNYKRQSKGEAPDDFICIKVCEDEAACGGTAGACDAVVIDDAGKELHYCSFCGDTSQAPINGKCVAAGSYDSNTCSKGVCTQCTANYFLYMNGCYKIGQTPGQYMCTAAATGFCTAPDSKKKFFNIPEATKQEQSVLACGNPLGTVTGADGTAKAYVGVPSCTACTPPSAPSNGGMAAAKCTACEAPKKPNQDGSGCTLCAVAECKSCITDDVCEVCENSKKPNKAGNACYACSPEGCSHCSADNRCEACADGGKRPSLDGAQCITCDIDRCTRCSAEGVCGECEAGYAPKDGKCEPGSTGPNLSTGAIAGISVAVVVVVGGLVGFLCWWFICRGKA

SEQ ID NO: 434 - protein, 785 aa, Giardia intestinalis
MHRQHSWAWCEAELMAGWEARPPDGPQSQRPKDASSQALAEWVTHGEQRRGRRADHRHSDRPGCSGGRGPSGILHQELPHPVDTTMLLIALLFVSSTLAADCRPDGDHAATCQTGKCEVVGSSEICTQCRAGGAPIDGFCRPVGSPQVITAGCTKGDGTALEQTAATCGKCGSEYFLFMGGCYNQKVGIGGTICTAAAGGECSTCATANWLFENPSRTPGPGTKCILCSDINGDGTTKGVENCAECTKPGTPIATTCSKCKAGYAKKENACVQCGDGCSECSAATPTQCTACFYGKYLKADKCVDASGCGDGNYADPKTNECKPCGIAECATCEYNATIGKPQCKTCNPPTKMVKTAADGVTTCVDESGCTSGNTHFVTDSGSKACVPCSDIKSGGVAGCSTCTAKGQCSTCLSGYFGSSSCEKCGANCATCTQAGDTNCQTCKPGYFFKSGSGPGQCFPCDSKADKGIEGCSQCSNGPTPTCTECKPNYHKKTGSAVTCEKFCEDSTACGGTAGACEAIVVKNAGDFLHYCSLCGDPKTFPINGKCVDNAQGNTCANGVCTQCAAGYFLYMGGCYSAANTPGNLMCKTAEGGKCTAPNENNKYFLVPEAASNQQSVMACENPLGTAVGEKAYVGVEGCDTCTAPAPLTEAGMRPARCTACNSDGKPNLAGSGCFKCNIPTCSHCSANGVCEACTNKEQRPNTAGTQCISCNIDGCTRCSEENKCDQCGDGYRLEGEACIATKPSGGNRSGLSTGAIAGIAVAVVVVVGGLVGFLCWWFLCRGKA

SEQ ID NO: 435 - protein, 683 aa, Giardia intestinalis
MLLVALYFVISTLAVDCQPDGDHATTCQVGKCELVDDTEICTECKAGGVPIDGFCRPVGSPQVITAGCTGPEDAPLDKATTTCGRCSGADHFLFMGGCYNQKVGVGSVICTAAAGGECTACATANWLFENPSGTPGPGTKCILCSDIKGDGTTKGVENCAECTKPAGSPGVAICSKCEVGYYKDGTCKKCDATCLTCSGSGNTACETCPEGKYLKVNQFVQSTGCDGNTYPDPETRTCKASGIADCTTCEYNPVTKGPRCIACSGKIVKEEADGTTKCIDAGTCTQNGATGENFLSDGDTECILCSNDSSKTDNNKGSVGCRTCNKNGAKPECKTCLDGYYDSGNGNPAVCVACAGDCGKCGPGGAIDTCEKCKSGFFLKSEGTKKCVRCDDPADGITGCATCTFSGLLTCDTCKPNYTSKTTSRGVACEKACEDETACGGTAGACDAGIVDPSGKTLNYCSLCGDPATFPIDGKCVESSKKGANTCDQGACTQCTQGYFLYMGGCYRYDAAPGSHACSASAAPGVCSAPSPNNQFFVVPGAANNQQSVLACGNPLGTAVGDRTYVGVEGCSQCTAPAQLEASGMASATCTACGEGRKPNKSGTGCVACSVENCRHCRVDGVCEECSSGFSLEGGKCISTGTSGGNRSGLSTGAIAGIAVAVVVVVGGLVGFLCWWFICRGKA

SEQ ID NO: 436 - protein, 680 aa, Giardia intestinalis
MLLIALLFVSSTLAADCQPDGDHAATCQTGKCEAVGSSEICTQCRAGGAPIDGFCRPVGSPQVIAAGCAKGDGTALEGMAATCGKCGSECFLFMGGCYRTGSQPSSEICTAAEGGKCTECNADNGLFKNPAAAPDAGRECLLCWDTTGANGYTGVDKCTACTKADKTEGKAECSACQDGHFLSDKLCKPCTSPCATCEAAATTCGSCIAGQYLNGNTCVAEGSCGGSKYADELTMTCKACTTIHEQCTACSFDKARGKPKCTNCGPSNTPRTSLDGTSTCVGKTDQGCQGEDKELFMKEVDKTCALCGDDSTKTPGNEGKANCKKCTKTTTANPECSECLDGFLFNTDAKTCADKCDDSCKTCSVKTNPNKCESCYPGYFPIDSTEPPGKKCVPCDDANSGGREGCSACSNTGGFKCTDCKANYQKEGSPDNYTCKKTCEDETACGGTAGACDAAVVDGSGITKHYCSFCGESSKFPIDGVCVSDAKSNTCSNHVCTACTTGYFLYMGGCYKAAGPPGSLVCKAAGDGVCTEAAAGYFVPPSPTKDKQSALSCSNPLGVELADQKAYAGVEGCSRCTAPAQLEASGMAAATCTACGEGRKPNKSGTGCAACSDANCRHCRVDGVCEECSSGFSLEGGKCVSTGGPNLSTGAIAGISVAAIVVVGGLVGFLCWWFICRGKA

SEQ ID NO: 437 - protein, 597 aa, Giardia intestinalis
MYLGGCYLVSDGLPGNSLCVLAANGICTEAAPGYFLNPLKANSKDSVISCSNTTGFTESDKTYRGVQHCDKCDGSALTGNASGDAKCTKCSSNKYLKSDGTGCVDAANQCNANTEFGKENQETGNKCLKCNDPTSGVADCAECTGIAEGKTKPACTKCSAGFLLAPEGGETSCPANCPEGYFGHTDSTQKKTCQSCSSENTGLNPAGAGVAGCVKCTYGSNKVTCEKCGQDKYLKIDGETTSCVDAQNCGEGFLMITSGDIKKCVKCGDTANGGIEHCAKCSLKASSAEEKLEIMCSECTDRRLSPLNNACLENCPAGSYAHDGNLCLPCHNTCAECDGNAEATSCRACYPGFVLSKGNSGAIGTCIPACTGKYAENCEENMCTALVGGSKYCSKCKTGFVPVDGICVSSTARAPTGCTPGDGVCTACTDSYFLQSGGCYQSTAFPGNKLCTTASQGKCTSCANGQQADGSSGSCPACDSTCETCTEANKPDKCSTCPPSRYLDSTANACKLCTESSNNIQGVANCLTCVPPSGNSGPVTCYVKADGTSGGDDGTGGSTNKSGLSAGAIAGIAVAVVIVVGGLVGFLCWWFICRGKA

SEQ ID NO: 438 - protein, 460 aa, Giardia intestinalis
MFDKLIFASLALQLAWASQTASTAIVGSTPCNPQTPGQTSCAADSCNVEIDGQTFCSKCTGGKVPVNGECKTKAEASLCTPGTDAQEGTCTACTGAQNLYMGGCYNDCPHGASGTANVCADAPSGPTPCNPQTPGQTSCAADSCNVEIDGQTFCSKCTGGKVPVNGECKTKAEASLCTPGTDAQEGTCTACTGAQNLYMGGCYNDCPHGASGTANVCADAPTGCNIPNCEACSEDKRTCTRCQTRYFLTPEKNACLDACPAGSYATGQACTPCDPSCAECSGAGASKCTACPAGKMLRYADEGKPTDGTCVEGCVEGPECEACGLTIGGTKYCSKCKGSSVPLNGVCTSNAARAQFCTTAADGACTVCAAGYFIQGGGCYETTRQPGEQICALTDNKGKCQTCANGLGPDGAGTCPSCNPTCKTCSAANQENKCTTCATGYYKTALEGVCTSCESDSNGV

SEQ ID NO: 439 - protein, 829 aa, Giardia intestinalis
MLGFLWALLLASLCKDSRDTYYNSFGVKCENKQENCAQNRCLSIGSWTPCTQCVPGYVPINGTCQKYPGDSSSSCTPDDPNSPTRCIRCTSTANVFLFYGGCYTITTTKDKNLGDFLCSEALSGVCTKCFESKLERYVFTNPEQTAAEKCILCSDTVGFNGYKGVSGCLDCLLPITDKIGTALCVKCDYTEQDRDFYPIDYKCQPNGLHICANGYCTSCYKTHLSYKYGCYSRHSSTGLAICAEANQYELDNVTICKECVNASYAPKNGACTLVKNDDSLDNSFSDCTKDENRGLCTGCSNTGESFLFYGGCYDRSSRIGSRLCSKVEQGKCTQWSSTFDFIFPKTDTSSGDRYLCGDTSKDGVAGCATCSYANGAVTCTRCSAGYLGVDGRSCGKDCSENTQGACSEVVEKSSSVKILSCRCVCKPTFYNNSGTCASCADSCAVCKDGTSTGCQQCSPGKILNFPIASSESADCVSQCVVGSECAECGLTIDGSRYCTRCKDSSTYPFNGVCIAEPAQRDAYCTTKANGVCTTCSSSVFLMSGGCYTTNTYPGNTICDKQADGKCTTTKEGYGISDDGKLQPCDPTCLECAAPGPGRCTKCPPGKLLRRAPAAATGSCVEPGACADGYYADGDACLPCVVPGCRACGRTSFCTECAGELFVGLDGRACLRECSGDRVVGEASGGTRRCWCERGFAPALDRSGCVPAAECPPGMPWCASCDESGRCLSCAAPGHNIQVDQRTCAEGCGDRAAPNQGVCVCEIGTVLTRGVCVSTRDAAKKKTAAIAAGTTAGILVVGALVGFLCWWFIFRGRRIGSSSSVTSLIHSKSA

SEQ ID NO: 440 - protein, 765 aa, Giardia intestinalis
MLSAPWAVSSMFEKILFTSLILQAAWSACTDDTVAPGKCAKGKCDVTIGKTKYCSQCSTEGEAPVGGECVSVTEPGPAKQLCPQSVGGKCTQCAQDSFMFSGGCYQVKQEPASSLCTSTDRAGVCVIAASGYFVPPNANSRQPSVVSCSDTAGVILGGKTYKGVAECTRCTTEGLTSEGGAARCVACEGKKPNKAGTGCFTCSTPNCATCSADDTCETCTDGTTSSGSCAEAKAGCHATCINTKCESGHTIDKNKCKECKADAPYLKLASSAATYGECVTAAECTADGTHFTKDNVQINSSPIKVCLPCSDTKGITECQICMSEPDAAALSCNVCDAAKAPNTAGTQCFDCNIANCVKCDSPGTCAACGSGYILAKNKCEPCTVIGCKTCTDGGDGQTCTECMDSTQKISADKSKCVACGVENCVSCNEDDVCAQCAEGYEILDSGRTCTEKAAGKCKVSSCKACSKDKKTCTECEPGKHLTPTKKACLADCPAGTYLLEQACTPCDPSCAECSGAGASRCTACPAGKMLRYADEGKPTDGTCAEGCVEGPECEACGLTIGGTKYCSKCAADRWAPRNGVCADTAAARSPFCTSASGGACTQCAGGYFLQDGGCYQTTRLPGKSVCRTDNNSGKCRECANGLAAESDICPLCDSTCATCSVKSDPAKCKTCPPGRYLDAGNACKPCTETSGSIQGVADCVSCAPPSGDTGSVLCYLMKDDGTGGSTNKSGGLPPGAIAGIAVAAIVVIGGLVGFLCWWFLCRGKA

SEQ ID NO: 441 - protein, 470 aa, Giardia intestinalis
MIFVWIVFGGALAACREGILDGDCFLLSCDVILDQVYCSVCTAMTEFLIDGQCLPTNVDNTCRHSFGNGTCDSCAGPYLSYRGGCYRVGEDPGNFICKPEDVFYVDGTALCRKCVVYGEFPIDGSCTKKAQGNRCGTKGYEGVCETCGTGYFYHNGGCYRKNRFPGNKICADSSAIEHVGHCGTCLAGYETYKGKCLACEDIHCRKCGVSMSNCEVCHDGYYLDRDMNEGKGACIPCNPISNCETCLTDGECTSCARGFFAGFLGVSGRCVSCDKGGDGYAGVPHCQVCLPPHPDTSDLAAFCTECTDGFYLLVSDDKAQTSCVVSCPKNKIHYSNRCVTELEGCHNYGRNDECVKCVSGYRLTDGVCERCTVDNCEMCVSSSSVCDACKAGYGLEDGICNLCGEGCRTCDGDISVCTTCLLRFNYISPGKNCCISTCPEHSREVFDGELGFCECYGSYKPSIDGLRCEK

SEQ ID NO: 442 - protein, 198 aa, Giardia intestinalis
MLDKLLFVSFTLQLAQATRVVEKTKVDPTPCDAADPGATNCDAGNCDVTINSKTYCSKCKSGYVPVNGACTLQAQATMCTPGSGGAEGTCTACTNTQGLYMGGCYDDCPYGDGVAPNTCADAPAGCNIPNCKSCPDGTCTECNDGFVLGNGNKCVASSVNKSGGLSTGAIAGISVAVVIVVGGLVGFLCWWFLCRGKA

SEQ ID NO: 443 - protein, 699 aa, Giardia intestinalis
MFKTILFVSLILQVTLAAAQTCIPNESGKGKCKTCDAIIGTDSYCSECAQEGEVPIDGVCIGKDDPGVATAGCQNSGGTPIATEKVCGQCSDGYFLHKGGCYSVEAEKPGHTICTAATKGVCTLEANGYFATPKISIEGVSVVVCSDIVGATIDGIKYKGVADCIQCSPPPGSLGTREDKVAVCSRCKGEKYLKTDGTCANDSSGCTVFTEFAKADPENGNKCILYRDTTAGGIQYCEECSLAADQGKAALITCFACGSSKKLSPGKTSCMDACPAHSNDKATPNICECDDGYTPDEAGTQCTGTPLPPPPSDCPVENCQKCSADKKTCEECKDKNYLTPTKMCIDRCEYITGYYSGTEGGKGVCKKCDIENCFVCGPDGKCDFCNDGFYADGAGVCQKCDESCKTCDGGASTDCLDCGNGKIMSYINDIKGSCIPECTQGSGAGSCETCGLTINGAKYCSKCSQGNEYPQNGVCTTKARAAPTCKDDTIESGVCKVCADGFFKMNGGCYSTAQLPGLMVCDIATPTGGSCQVYSEEGYSLDGSGNVIDCPANCGGCRDKSTCTVCMDGYVLVASSNTCLPCSTGCAMCYPGADKCIACLSGYYLSGTACVKCTESSNNGNEVIGVADCLNCKVPSSAGPVICYAKKDSTSNDDDGTGGSTNRGGLSTGAIAGISVAAVVVVGGLVGFLCWWFLCRGKA

SEQ ID NO: 444 - protein, 572 aa, Giardia intestinalis
MLITFLIMLNTFAANCRRNRDHAVTCKSGSCELIDGMEVCTQCKAGGVPIDGFCWPFSSPQVITAGCTKGDGADLDSTATTCGKCSGADHFLFIGGCYDQKKWIGGTICTTASGGECTVCARANWLFENPSGTPAPGTKCILCSDTNGDGKVRGMENCVTCQTPGNSPGISTCDICRIGYANDGDTCVQCGDGCSACLADTPTQCTACFYGKYLKADKCVDASGCGDGNYADPKTNECKPCGIAECATCEYNATIGKPQCKTCNPSTKMVKTAADGVTTCVDESGCTSGNTHFVTDSGSKACVPCSDIKSGGVAGCSTCTAKGQCSTCLSGYFGSSSCEKCGANCATCTQAGDTNCQTCKPGYFFKSGSGPGQCFPCDSKADKGIEGCSQCSNGPTPTCTKCKPNYYKQMGNTVTCKKFCEDSTACGGTAGTCGAIVVQDTGDFLHYCSLCGDPNTFPIDGICVKEKSGNTCENGVCTQCAAGYFLYMGGCYSAASAPGNLMCKTAEGGKCTAPNENNKYFLVPGAASNQQSVMACENPLGTAVGEKAYVGVEGCDTCTAPAPPHRGWHEAC

SEQ ID NO: 445 - protein, 616 aa, Giardia intestinalis
MNALFYQLLGKWNHRQNVCFHVGSNLKRTSMLLIAFSFVLSALAAACTQPANIQNCVEEKCEMNDTEVCTQCKADGGAPYLKDGTCVTVDDCRQAAGYYPDDTTDSQNKKCMTCDSTCATCSGAGADKCTKCKPDAGDGKQYLKDGTCVTILGCAYDNEHYADDGTKECKVCNGGKRPDTVGTKCFSCPDKNCERCDQDNVCAKCNTGEPPTDGACPVAERGCHPSCGECTSDAMTNQADKCTSCKGDNYLRVIASGSGICIPASICASDKSYFAKEVAESTGPKKMCLSCSDATHGIADCKKCSSEASSAQTKLVLVCSDCDIKWLSPLGNACLEECPAGTYSERGTDNIGVCAPCHDTCAECDGNAEATSCRACYPGSVLSKGANGATGACIPECTGKYAENCADGQCTAVVGGSRYCSRCRAGFVPVDGVCVSATARAPTGCTPGNGVCTSCTATYFLESGGCYNARAFPGSTLCTTASDGKCTNCANGQEKDGQGSCPACPDGCSKCATSGSPKACSECLPGYYKSGNSCIKCDANDSQITGVSGCLSCAPPSGNQGSVICYITKDGGSGGGNTNKSGLSTGAIAGIAVAVVVVVGGLVGFLCWWFICRGKA

SEQ ID NO: 446 - protein, 971 aa, Giardia intestinalis
MLITFLIMLNTFAANCRRNRNHAATCKLGSCELVGGIEVCTECKAGGVPIDGFCRPVGSPRVITAGCIGPEDATLDKAATTCGRCNGADHFLFMGGCYEQKMGIGGIICTATSSGECVTCATTTWLFENPSGTPAPGTKCILCSDVNGDGKAKGVADCATCQAPDSSPGVATCDICRAGYANDGDTCVQCGDGCSACLADTPTQCTACFYGKYLKADKCVDASGCSDGNYADPKTNKCTECGIDGCATCEYNATIGKPQCKTCNPSTKMVKTAADGVTTCVDESGCTSGNTHFVTDSGSKACVPCSDIKSGGVAGCSTCTAKGQCSTCLSGYFGSSSCEECGANCATCTQAGDTNCQTCKPGYFFKSGSGPGQCFPCDSKADKGIEGCSQCSNGPTPTCTKCKPNYYKQMGNTVTCKKFCEDSTACGGTAGTCGAIVIQNTGDFLRYCSLCGDPNTFPIDGICVKEKSGNTCENGVCTQCAAGYFLYMGGCYSAASAPGNLMCKTAEGGKCTAPNENNKYFLVPGAASNQQSVMACENPLGTAVGEKAYVGVEGCDTCTAPAPLTEAGMRPARCTACNLGSGKPNLAGSGCFKCNIPTCSHCGANGVCEACTSEEQRPNTDGTKCISCNIDGCTRCSAENKCDQCGDGYRLEGEACVQIQPNPCKTENCQECTNKGTANEVCTECISTHYLTPTSKCVLDCTAISGYYGDANKKCKRCHDACAECVGAASNQCSACPAGRMLQYTNTNTPAYGGTCVDQCSVSTTTEGCAECGAKIGGTDYCSQCSVDNQAPLNGNCAVNTRAAFCATITGGACTKCNEGYFLKDGGCYQTDRQPGKQVCSSAQGGACNQCANGLQAQGGACGACHSTCATCSAAGAADKCKTCATGYYKTSDNEGSCRKCSEGLVGCRQCTASATAFVCLEMSDNTSGNVNKSGLSTGAIAGITAVAVIVVGGLVSFLCWWFIYRGKART

SEQ ID NO: 447 - protein, 625 aa, Giardia intestinalis
MNALFYQLLGKWNHRQNVCFHVGSNLKRTSMLLIAFSFVLSALAAACTQQTNPQDCTENKCEMIGNTEVCTQCKAGKVPINGACADPAGSSAKCKNADNSGNADQTCGKCLGATFMYKGGCYDRESAPGNVICKTPGDTDGVCDECQDGYFRHSTPVDTKDSCISCDDTAGVDHNKGIANCKTCVSPGSAGTADTPQTATCTGEAADKCTSCTAGTHFLGATSGEGPCVSCGTVQATWSGVKDCAKCNEPADADTPAVCTECAANLYVKADVGVMACVAASECGEGFFPATVGGVKKCVSCDETDNGGVETCAKCALKTPVPEAGTVVTCSECDGSKKLSPLKDACLNSCPDGTYDKQNVCAPCHSSCASCTDATSATCTACYPGFVLNATAGASAGTCVQECTGKYAENCADGQCTAVVGGSKYCSKCRAGFAPVDGVCVSSTTTRAPTGCTPGTDGTCTACTDTYFLQSGGCYQSTKYPGNTLCSNAASGKCTQCTNGQQADNNSGSCPACDPTCKTCTAKEDPNACSACFPGYYKSGNSCIKCDANDSQITGVSGCLSCAPPSGNQGSVICYITKDGGSGGGNTNKSGLSTGAIAGISVAAIVVVGGLVGFLCWWFICRGRA

SEQ ID NO: 448 - protein, 834 aa, Giardia intestinalis
MLHLIKKLMLGFLSILLLVSFCKDSRDTYYNGFGVACNDTQTNCAKDRCLSIGLWTPCTQCVPGYVPINGTCQKYPRDSSPPCTPDDPVSPTRCVVCKQEANTFLFYGSCYTIATTQDKDLGDFLCSRASGGVCAECYGDKHERYVFTNPDQTAAEKCILCSDTVGFNGYKGVSGCLDCLPPITEKVGTALCARCSYTNEDKHYYPIDYKCQASGPHGCINGYCTSCYKTHLFYKFGCYSRRSSTGLAICAEANQYELDNVTICRECANSSYAPEDGKCTLVKNGISPSDSFSECKKDDTRGLCTGCSNSEDYFLFYGGCYNKRRAPGSKLCSTVVSGACTEWKMQFDFIFNKSDNSGGYLCGDTTNGGISGCATCSYANNAVTCKRCSAGYLGVDGRFCGESCSGSTQGTCSEVVEGSSSVKILSCRCVCKPTFYNNSGTCASCTNSCAVCKDSTSTGCQQCSPGKILNFSIASSESADCINQCVVGSECAECGLAIDGSRYCTRCKDSSMYPFNGVCILDAKKDAYCTAKANGVCTACSEAAFLMNGGCYTTSHYPGDTICNTKSGGKCTASREGYGISADGKLQPCAPECLECAAPGPGRCTRCPSGRLLRRASAAATGSCIEPGACADGYYADGDACLPCVVPGCRACGRTSFCTECAGELFVGLDGKACLRECSGDRVVGEVSGGTRRCWCERGFVPALDRSGCVPAAECPPGMPWCASCDGSGACLSCAAPGHNIQVDQRTCAEGCGDRASPNQGVCMCEVDAVLTRGACVSAREVARKRVAAIAGGTMAGVVVVGGLVGFLCWWFICRSKRIGASPSTTALVRSKSV

SEQ ID NO: 449 - protein, 689 aa, Giardia intestinalis
MFDKLIFASLALQLVWATQIEQIVRSATCDSTTSGSTKCTVEKCNVWIGGKDYCSQCSTDAELLIDGRCVPTTPELAKKCITDNKGKCSSCGNGYFLHRGGCYRFGAAPGNAVCNEPSASGDSLLAGVCTSCGLGYFKNPAENAASTPPCIACNDTAGNSGNTGLVGCSTCNPPVSGQATCTACLDGFFGIGEGAVTCTECTGECKTCKGGANQCTSCKTSSKYLKITDSVAGTGECIDQGQCTETHFATVDDGINMCYLCNNTDKGGKVGCRTCTKSGTVTCKTCLDGFFGTTDCVACHENCLTCKAEAAKCTSCKADTKPYFKEGADGDQTGTCVDETECKGDHFPATDTGSANKKVCVPCGKADKGGITNCKTCAFKVSSTREGPAITCTECATDNLSPLKDECMAACPAGTYANSNVCAPCHKSCASCQANDKETSCTACYPGHSLLYGVRGATGTCVKECTGEFGANCADGQCTADVGGAKYCAQCKDGYAPIDGVCTAVTAGRDASMCTAAGGKCTACKGSYALISGGCYGTRKLPGSAVCTAASNGDCSACANGQQPSGKACPACPACPAGCSKCAAGSSPQQCSECLPGYYKSGTKCVACDKDDEANIKGVPDCVSCKEPAGSGTVICYVTQQRTDDGTGGSTNKSGLSTGAIAGIAIAVVVVVGRLVGFLCWWFICRGRA

SEQ ID NO: 450 - protein, 585 aa, Giardia intestinalis
MAATCGKCGSECFLFMGGCYRTGSQPGSEICTAAEGGKCTVCKTDNGLFKNPAAPQRPGSECILCWDTEGDGATKGVKDCATCTAPQSAAAATCKTCKAGFSGTSSCTPCTGDCTTCTESSPTECTSCKDGKYLKRSQCVAKGECTTDHYPDDTGMECVACSTIDSCTQCTFDLTTKKPKCTNCGISKKVKTELDGTTTCVDIATGCEDENHFKDGDTACLLCGDVKGVPNCETCSGAKACTKCLPGFFRVSETSCTACGDNCATCSEAGNANRCLTCKSGFFLITENESKKCVPCDSKTDDGIDGCAECDNSKGSLKCTKCKPNRKPAGKEGDYTCTVKNCEDDTLCGGTAGACNAIILDAQGKEFHYCSFCGESSKFPIDGVCASNGDKAGNTCADGVCTQCTTGYFLYMGGCYKAAGPPGSLVCKAAGDGVCTEAAAGYFVPPSPTKDKQSALSCSNPLGVELADQKAYAGVEGCSRCTAPAQLEASGMAAATCTACGEGRKPNKSGTGCAACSDANCKHCRVDGVCEECSSGFSLEGGKCVSTGGPNLSTGAIAGISVAAIVVVGGLVGFLCWWFICRGKA

SEQ ID NO: 451 - protein, 478 aa, Giardia intestinalis
MLLLALCFALSTLAVQCRGSQHSSCAAGQCKVVRGVEVCTRCRAGHVLVNGMCTSNSAGYEVVSECAVANCERCNADKVHCDQCAEGFEANSDNTQCTKAPEQQCSTPDCKACDNPRTDREVCTECLSDKYLTPTNQCIDHCEYILGYYSGIDNGKKVCKKCEVPHCLLCRGDGTCYFCEDGFYTNSARSCQKCDDSCKNCEGNTANDCVECKQGTVLDYANGQKGKCVPECVVNADKASGNCKTCDLIVEGTRYCSACSKDDEYPQNGICAPKPSGRAAACTSQGTGVCNTCADGLLRMNGGCYEDEKYPGQSVCATVASTGGTCDSPMPGFKLDNNNNLITCPEGCETCSTADQCTKCVDGYVAVGSVCTKCHESCVICTTNAATCKACALGYYKESNSDGPCKKCSEGLAGCKQCTVSVNGKFICLEMGDGTGGNTNKSGGLPPGAIAGIAVAVIIVVGGLVGFLCWWFLCRGKA

SEQ ID NO: 452 - protein, 128 aa, Giardia intestinalis
MLLVLLLIYMVAQANCTPALTGAGCATCTGQGDSQTCLTCNPLANKVQPGGKKCGDGCPANSTPKGNLCECNGGYRPNAEQGQCISSSVNKSGGLSTGAIAGISVAVVIVVGGLVGFLCWWFLCRGKA

SEQ ID NO: 453 - protein, 363 aa, Giardia intestinalis
MLVVLLLICINVLAKYSGRETCEPATGVCDGSLSKAGCATCTAAGSDQTCLSCTTSSHKIRPDEKGCIAACPEGVSTDVDGFCECKNGYQPSASGETCELDACNTPNCKACDNPKTDREVCTECNDGNYLTPTSQCVPDCTVISGYYGDADKKCKKCHDACTECIGAASNQCSACPAGMMLQYTNTNTPAYGGTCVDQCSVSATTEGCAECGARIGGTDYCSKCKGGQVSVDGVCAANTKRNVICTTLSDGVCSACTEGYFLFAGGCYKTGQQPGKQVCSNAVGGKCTKCASGIDVVDGDCSTRKCHESCETCTTANDPNACTTCNTGYYKPQKCWDKVQSVFRGARRVQAVHSVICQCVHVP

SEQ ID NO: 454 - protein, 460 aa, Giardia intestinalis
MKGDALQCLECRDLYLSLDKKSCLAGCPRGQKGVRDPSSSIHSCTCDDGLYLKDGGCVKCAVENCAKCNESKCSKCRYGYTLSNDQCAETKCKDPNCDACENRNVCTKCSNNYSLDQNGLCVKDCLSSAGYYKATVGDVSRCVACTLGGCAVCESADRCKTCRDGFYLESQEGCKPCSSACATCSGPEAGDCTSCPAKRRLQYSDGTKGSCVPQCVKDGSCAACGLTIDGTSYCSQCVKSTEYPRNGVCASTGSRATGITCANAFGGQCITCGPSSFRLNGGCYTSKLLPGKTVCSGERDGWCENVAAGYGITYNGTLLTCPEHCKVCTDGSCSSCNSGFYPENGVCNACPEGCATCPHGRACFDCLAGYYFSENICKACHKAVPKCSLCAVPEGATQPVCLEYGRSPRPALSAGAISGITIGAVLVIGAVTAVLVWLLVFRKRAGVPPLYKQSTVASTQ

SEQ ID NO: 455 - protein, 632 aa, Giardia intestinalis
MLLVVFYFVLIALAVACSGSAQSNCVENECATIGATIICIKCQAGNVPINGICKPKAENVETCKKANDSEADQTCEKCNNGYFLYKNGCYQFGNDVARLICNDQAVVPGGRNNPVAGVCTECNTSGGFFKNPEAADTTDSCIACNDTTGVQVNGGNTYKGVQNCVVCGAPGTGTGNEQKIAACTACEDGFFVTSNGATCTQCKDTANCAKCDAGADKCTKCKTTATNKYFKDGGDGTGTCVNEQACKEQNTHFPKDDPNNGNKCLSCSDDKSGGIADCKTCTLKEKPEGSILVTCSSCTAGTNKPNIDGTKCIACAVKDCAKCNDDGTCAECNDSKKLSPLGDACLEKCPAGTYVDSNGGISVCTLCHNTCAECNGSADATACTACYPEYSLLYDSSTTGTCVKECTGQFSANCAEATCSAKVGGSSYCAQCKDGYAPIDGVCTEIKAPAGRNQDICTASGGKCTACKGAYALISDGCYSVNKLPGKSVCTAANDGKCSICANEQAHSEGKCPACSDGCLKCKTNVAACTECYSGYYLFNSKCFKCTNGNEADIKGVENCISCAPPTGDTGPVVCYIKNDGTSGGGGSSGGGSTNKSGLSTGAIAGIAVAAIVVVGGLVGFLCWWFLCRGKA

SEQ ID NO: 456 - protein, 585 aa, Giardia intestinalis
MLLLALCFALSTLAVQCRGSQHSSCAAGQCKVVRGVEVCTRCRAGHVLVNGVCTGNSAGNEAEPECAIPDCAQCNADDPAKCDKCRDGYSPNQEKTQCDKDPEPECAIPDCAQCNADDPAKCDKCRDGYSPNQEKTQCDKDPEPECAIPDCAQCNADDPAKCDKCRDGYSPNQEKTQCDKDPEPECAIPDCAQCNADDPAKCDKCRDGYSPNQEKTQCDKDPEPECAIPDCAQCNADDPAKCDKCRDGYSPNQEKTQCDKDPEQQCNTPNCKACDNPRTDREVCTECSEGNYLTPTKQCTQSCGTLGGYYNGDKVCEPCDPSCAACTTKGPTKCTLCPPGKRLQYTDEGAPQGGGSCVDECRPEGGAGGCETCGATIGGTKYCSKCSTSSEYPVNGVCTADNARAVVCVTKDGKGGCTTCDNGYFLQDGGCYKLGRQPGEQVCTVAGNDGQCQTCANGLEAQAGDCLRSACHPTCKMCSAADASTACTMCATGYYMVGAGPKACTSCEADSGSVKGVSGCLNCAPPSGDTGSVLCYLTKDDGTGGSTNKSGLTTGAIAGISVAVVIVVGGLVGFLCWWFLCRGKA

SEQ ID NO: 457 - protein, 255 aa, Giardia intestinalis
MSGSVTCTKVCEDETACGGTAGACNAIVVGADGKGMNYCSYCGGADDVPIDGRCVNKANANDNTECTAHKCPSCAAADYFLYMGGCYSTKKEPGNLICTEAKDGKCIAPTSRYFAVPDAAKTGQSVLACGNPLGTAVDDKTYVGVEGCSRCTAPARLEASGMASATCTACGEGRKPSKSGTGCVACSVENCRHCKADEKCEACNEGFSLEGGKCVSTGGPNLSTGAIAGISVAAIVVVGGLVGFLCWWFLCRGKA

SEQ ID NO: 458 - protein, 465 aa, Giardia intestinalis
MCAMWLAASGGCFHCLPNRYSSFKLAASILRRAMLYLTALVLIGLASADPPAPKQCNGAVPQCVADGENCLNIKIDGSPKDVCIKCEPNNVPIDGACKAAADNTNSCVTPDSGAGGVCASCQGESYLYKGGCYTACPQGTPNPETNTCDGVPAPDCNIPNCEACSEDKKTCTTCQPGHLLTPEKNACLGACPAGSYAAGQACTPCDPSCAECSGAGASRCTACPAGKMLRYADEGKLNEGGQCVEGCVEGPECETCGLTIGGTKYCSKCKGSSVPLNGVCTSNAARAQFCTTAADGACTVCAAGYFIQGGGCYETTRQPGEQICALTDNKGKCQTCANGLGPDGAGTCPSCDPTCKTCSAANQENKCTTCATGYYKTALEGVCTSCESDSNGVTGVRNCLNCAPPSTGSGSVLCYLMKGGDSTGGSTNKSGLTTGAIAGISVAVVIVVGGLVGFLCWWFLCRGKA

SEQ ID NO: 459 - protein, 460 aa, Giardia intestinalis
MLSFLWIGLILQLVRAEDECTPTPSGGFGTCRTCGAIINGKEYCSQCNGSGSFDSGCAPTDGVCTSDNNECAQKQDGVCTRCAYSSFMYKGGCYQSSRAPGNTVCETAQDGKCTTARVGYFVPPGADASHQSVIPCGDEEVVTIGSSKQYRGIPNCLTCTAPVNGDGADSTPKAPTCNACKDGFFVDASKESTCTACPANCLTCADGTAERCKSCTADTHFLGAADDGEGPCISCGDATQGSGAWRGVAGCAKCTKPQSAGPATCTECAADKHLKTDSGATSCVSAGECKDGFFPTTDSTGKRVCTTCGDTANGGIEDCAKCSLKAASAGAGPLVTCSECSSKKLSPLGDACLTACPAGTYPNDNGVCAPCHSSCVSCKNSSAEASCTACYPGSVLSRTSGDAGRCTPECTGEFVAHCAAGQCDGVVGGSKYCKKCDNGYVPINGICTAAGAAGRGASVC

SEQ ID NO: 460 - protein, 750 aa, Giardia intestinalis
MMLVILTDGSRRRVFSPEHAPLSLEPYHDLCYTTMLLVAFYFAISTLAEACQPDGDHAVTCQTDKCETVGDAEICTQCKAGGVPIDGFCWPFNAPQVVLAGCTGKDGADLASSATVCEKCDSGYFLFMGGCFKKGSESSQTLGDSICETAQDGRCTKCKADGNVFQNNADTVTLGNECVLCSDITQRDGVMGVAKCLQCTAPNSKKGAATCTACADGSFVSNKACVDCNQNCATCTGSTQNECASCKDGKYLKEDTHTCVAGTGDTCGANNYADKRTWRCKSCTEITDCDTCVYDEQLNGPKCKTCGSSKIVQTEIDGRASCVELNTCTENGQPGTHFRSDGNKKCIACSDTTTEVAQKDQGIAKCKTCTKADGATQPVCSVCLDGFYFDTTCKPCERNCKTCSAQNTCIDCIDGYFLNINACAEKCAEHCATCKKAGDINACTKCMPGYFLIDSTEGIKECALCTEVSKGGREGCSACSNTGGFKCTDCKANYQKEGSPDNCACRKTCEDETACGGTAGACDAKIVDSTGKTLNYCSLCGNPAAFPIDGKCTASKEGNQCSQGVCTQCAQGYFLYMGGCYSTANPPGNLMCKTANGGICTEAASDKYFAVFGAAKTDQSVLACGNPLGTAVGEKTYVGVLDCIACTGPEALVTDGMAAATCTACGEGRKPNKSGTGCAACSDANCRHCRVDGVCEECSSGFSLEGGKCVSTGGPNLSTGAIAGISVAAIVVVGGLVGFLCWWFICRGKA

SEQ ID NO: 461 - protein, 531 aa, Giardia intestinalis
MLVGVILLFAVAVSQCTPGENGCDTCDSGNTKCTKCTAGSGNGSDQEYLTDDGRCVTKAECVAGNGHYVVNEPDPSSGRMCKACAKDTKPNIDGTQCFICPDANCERCNQNNVCARCNNGEPPADGACPVAGKGCHSSCDGCTEDAMTNQANKCTGCKEGLYLKPEPTDGQSGTCLTAADCTSDQTHFTKEKAGDSKKMCLPCNDATHGITDCKKCTLKTLSEGAEPIVVCSECADKWLTPPGNACLESCPAGTHVDNVNGVSVCTPCHDTCAECNGNADAASCTACYPGYSLLYGSGIAGTCVKECTGEFGANCADGQCTADIGGAKYCAQCKDGYAPIDGICTAVTPAGRASVCTAAGGKCTACTGDYALMSGGCYGVAKLPGKSICTLASNGKCTMCAANKQAPIQEKCPECSEGCAKCADSNACTECYSGYYKGAGNKCFKCTANDNNGIEGVPNCVSCAPPSGNQGPVTCYVKADGTSGGDDGTGGSTNKSGLSTGAIAGIAVAVVIVIGGLVGFLCWWFICRGKA

SEQ ID NO: 462 - protein, 414 aa, Giardia intestinalis
MLLIAVYFVLNALAAECSEAHRATCGNGKCEKIGDTEICTECGANGNVPINGICKAHGSEETGAAGCKNGSDLSPSDVKVCIKCVSTNYFLFKGGCYKVDEVPGNTICQTAGAAGTCDVCKDGYFKNPVESLDNTKQSCIACNDTEGADYNIGVLNCAMCVAPETPGTSGGDKKSATCKSCLEGYYAENPLTCTQCEDNNCAICLGAGTGKCTKCKSGPGTGKEYLKITDIPGKSGECVEASKCTGTHFPATDSGNNKVCVLCSDVDNNGVAGCNTCTSTPISDSSNMVTVKCTECTTPKTNKPNVAGTGCFTCSIDGCDNCSENGVCEKCGNAKKVSPGKNSCVEQCPENSIEKESVCVCNSGYGPDSAGTGCVTVSTNLSTGAIASISVAAIVVVGGLVGFLCWWFICRGKA

SEQ ID NO: 463 - protein, 483 aa, Giardia intestinalis
MQPISNNIGVALCTRCNYAEKDNGISPIDYQCQAKGLHNCINGYCTSCYKTHLPYSGGCYSRHTATGFAVCAEANQYELDNVTVCTECADTSHAPRNGACTLVSASGSLFSDCTKDADRGLCTGCSSAGKSFLFYGGCYDRSSHIGSRLCSEVAGGACKQWRSSFDFTFSKAGGTDRYLCGDANNGVHGCATCRYGNGVECTRCSAGYLGVDGRSCGKDCSGSTQGACSEVVEESSSVKVLSCRCVCKPTFYNNSGTCASCTDSCAVCKDGTSTGCQQCSPGKILNFSIASSESADCVNQCVAGSECAGCGLTIDGSRYCTRCKDSSTYPFNGVCVPDAQEDAYCAIYENGVCTACSEAAFLMSGGATQQHTIQATPSAMQRRVASARHPGGPADVRRGVWGQGSSDQGVCVCEIGTVLMRGVCASTRDAAKKKTAAIAAGATAGILVVGALAGFLCWWFICRRKRASFSSSCTTLIPPSKPM

SEQ ID NO: 464 - protein, 536 aa, Giardia intestinalis
MYKGGCYRTGQEPGNAACARAAAGVCTQAAQGYFVPPGADASHQSVIPCGDVEEITVKDGKKYRGVPHCLQCNPPGPAQNASAVPALCTACEDGYLDFDDRCVACHKSCRTCESSNTEDGCTSCTAETYFLGAASGGEGRCIKCDDTTGAGSYKGIAGCLKCTQPESAGPAVCTECAANLYVKADVGVMACVAASECGEGFFPATVGGVKKCVSCDEIGNGGVGDCAKCALKTPVPEAGIKVTCSECDRNKKVSPLKDECMDSCPDGTYDKQNVCTPCHSSCASCTDATSATCTACYPGFVLNAAAGASAGTCVQECTGRYAENCADGQCTAVVGGSKYCSRCTTGYVPVNGICISSTTRAPTGCTPGDGICTACTDKYFLESGGCYQSTTYPGNKLCTTAAAGKCATCANGQTANGQGSCPACASTCATCASGNVDQCQTCFPGYYKSGNSCIRCDANDSKITGVSGCLSCAPPSSNQGSVICYVTKDGGSGGDSTNKSGGLSTGAIAGIAVAVVVVVGGLVGFLCWWFICRGRG

SEQ ID NO: 465 - protein, 436 aa, Giardia intestinalis
MLYIAVLAFTWLALADLAPKSCDGDGATSCAPGTNCLDVKVAGQPKEVCTKCESTHVPIDGACKPKAPEEDKCSRPTEGDDGTCAACKGAYYLYKGGCYTKCPQGTPNSETNTCDGAPAPDCNVPNCDTCSEDKRTCEACRSGYFLTPEKNDCLISCPGGSYATGRTCTPCHSTCSSCSDATENSCTTCYPGSVLSRNGGKATGACIPECTGGYAENCEATRCTAVVGGSKYCSKCRTGYAPVDGICVSTASRAPAGCTPGDGVCDACTGTYFLQSGGCYNAGTFPGNTSCIVASGDGKCATCANGQDADPQTGSCPSCPANCSKCSGDSSAKTCTECYSGYYLDAGKVCKKCSETSGNIQGVPSCMSCKAPSSPSALTPVTCYVTQQRTDDGAGGSVNKGGLSTGAIAGIAVAVVIVVGGLVGFLCWWFLCRGKA

SEQ ID NO: 466 - protein, 633 aa, Giardia intestinalis; identical to SEQ ID NO: 14

SEQ ID NO: 467 - protein, 615 aa, Giardia intestinalis
MFEKIIFGIAILQVVWAATTCTEASSDPQTGQCATGKCDVWIGGSNFCSQCSTAAEHLINGKCVPEGEDTEGKCTAKNDGTCESCKAGFFLHRGGCYEMGSDIGLLVCNDRTATADKDGICIACHDGYFKNPASDADKTKESCIACNNTAGVDHNKGVQNCATCDAPKTPGQSSAEQTATCKSCVDGYYGTTSCQQCHADCRTCTGNGEDKCTSCKDTGKQYFKEGANSDGTGTCVDENGCGNTHFPIAEDKKCHLCGSVSEGGVADCKTCSKTGDSVKCLTCEGTKKPNEAGTGCFVCPMEHCEKCSKDNVCEACGSEKKLSPLGDACLDACPAGTRTDANVCNLCHESCASCSTNAEASCTACYPGYVLNRSSDDTGTCIKECTGDFMAHCKADGCSLNVGGSKYCDQCEEGYAPVDGVCTSIPAAARDASGCKASGGKCTECGANYALLSGGCYNTQKLPGSSVCTAAQNKGQCQTCANGQSPAGRKCPACTEGCVKCAGSKETCTDCLAGYYKDAGDKCFKCTDSDKASSNAITGVENCISCAPPAGGNGPVTCYVTQQKADDGTGGDTGGDSTNRSGLSTGAIAGISVAVIVVGGLVGFLCWWFICRGKA

SEQ ID NO: 468 - protein, 705 aa, Giardia intestinalis
MITVIGTGDVRGAVLEMSQRPFSPWSLETPHTGEATRTPEIRYTGACLWGAHYPHSPRGSVTWCCVLYGLPAMFEKIIFGIAILQVVWAATTCTEASSDPQTGQCATGKCDVWIGGSNFCSQCSTAAEYLINGLCYPDNKDNGCEGQPSTGVCTQCAQGFFLHRGGCYKIGTEPGNLICEDTQASQTQGVCEACSSGYFKNPAADAAGTPPCIACNDTVGNSNNVGIANCKTCASPSAAGTENAPQTATCTACVDGFSPDSTGKTCVAVQCAENCLTCTSSGEDKCKSCKDGYFLGAASGGEGKCIKCNDTTGANSYKGIANCAKCTQPQSAGPAVCTECAADLYLKIDRGVMECVAAAGCGEGFFPTTVGGVKKCIGCSEAGNGGIDKCAKCTLKTPAPEAGVKVTCSECDSQKKLSPLKDECMDSCPAGTYDKQNVCTPCHSSCASCTDATSTTCTACYPGFVLNAASGASAGTCIPECTGQYAENCADGQCTAIVGGSKYCSKCKAGYVPVDGVCVSTTTRAVTGCTPGDGVCTACTGSYFLQSGGCYQSTTYPGNTLCSSATNGKCQTCANGQTADNQGSCPACPDGCSKCTGSASPQQCQTCLPGYYKSGDSCVKCDASANGIVGVPNCISCAPPAGGSGSVTCYVKTDGTSGGDDNTGGSANRSGLSTGAIAGISVAVIVVVAGLVGFLCWWFICRGKA

SEQ ID NO: 469 - protein, 692 aa, Giardia intestinalis
MFDKLIFASLALQLTWATQVKRMVRSATCDSTTSGSTKCAAEKCNVWIGGKDYCSQCSTDAELLIDGGCAPTTSDLAKKCISDNKGKCSSCGDGYFLHKGGCYKFGTAPGNAVCTEPSAPGDSLPAGVCTTCGSGYFKNPAESAASTPPCIACNDTAGNSGNTGLVGCGTCDPPVSGQATCTSCLDGFFGIGEGTVTCTECTGECKTCKGGADQCTSCKTSSKYLKITDSVAETGECIDQGQCTETHFAMVDGGINMCYLCNTTDKGGKVGCRTCTKSGTVTCKTCLDGFFGTTDCVACHEDCLTCKIEAAKCTSCKADTKPYFKEGADNDQTGTCVDEVECKGDHFSTIDTSNSDKKICVPCSKTDKGGITNCKTCAFKVSSTEERPAITCTECTTNNLSPLKDECMAACPAGTYANNKVCASCHSSCAGCQTDDRETSCTACYPGYSLLYEPNGATGRCVKECTGAFITNCADGQCTADVGGAKYCAQCKDGYAPIDGICTTMAAAGRDASVCTAAGGKCTACTGDYALVSGGCYGIQKLPGKAICIAANNGECTTCANGQQPSGKVCPTCPAGCSKCTGSAPSQQCSECFPGYYKSGDKCVKCDKDSENIKGVPNCVSCKEPANSSGAVTCYLTQQKTDDGTGGDTGGDSMNKSGLSTGAIAGISVAVIVVVGGLVGFLCWWFICRGKA

SEQ ID NO: 470 - protein, 445 aa, Giardia intestinalis
MLIGFLLVCATVLAKHNEKGSSANCNTPNCRDCTNPKAENEACTDCDPAYVLNGGQCVEKACNTPNCKACDNPKTDNEVCTACDPAYVLNGGQCVEKACNTPNCKACDNPKTDNEVCTACDPAYVLNGGQCVEKACNTPNCKACDNPKTDNEVCTKCNDGDYLTPTNQCVPDCTAISGYYGDSDKKCKACNPECAECVGPANNQCTACPVGKMLQYTDTNTPVNGGTCMDQCSVSSTNDGCAECGAQIGGTAYCSKCKNTQQAPLNGNCAASSRVAFCATITSGACTKCNEGYFLKDGGCYQTDRQPGKQVCSSAQGGTCQTCANGLQAQGGACGECHSTCATCSTAGDPNKCKTCATGYYKENGDDTTAGLCKKCSEKISGCKQCVSSSGSSVICLESEVGTGGSVNKSGLSTGAIAGISVAVVVVVGGLVGFLCWWFVCRGKA

SEQ ID NO: 471 - protein, 547 aa, Giardia intestinalis
MFYAFLLTGLALELVRAAQAGDECEEVASSEPNTCKACSAVVNGKKYCSQCNGGGSQSAPTDGVCSADNNECTRKQDGKCTQCANKSFMYKGGCYKDSQAPGNTMCETANAGVCTQAKEGYFLPPGTDNAHDSVVSCGDTTGVTLTGDKKYTGVAECVTCTQPGQLSIGGTKAAICTKCAADLYLKIDRGVMECVAESGCGEGFFPTIVDGVKKCAGCSEAGSGGIEDCELCIPRAPAPEAGVKVTCSKCHASKKVSPLKDECMDNCPAGTYDKQNVCTPCHSSCASCQTDDKETSCTACYPGHSLLYEANGATGRCVKECTGAFITNCADGQCTADVGGAKYCAQCKEGYAPIDGVCTAVKIGRDASVCTAASGKCTACTGAYALISGGCYGVAKLPGKAVCTAANNGECTTCANGQQPSGKVCPTCPAGCSKCTGSAPSQQCSECFPGYYKSGTKCVACDKDDGSIKGVPNCLSCKEPASSSGAVTCYLTQQKTDDGTGGDTGGDSMNKSGLSTGAIAGISVAAIVVVGGLIGFLCWWFICRGKA

SEQ ID NO: 472 - protein, 673 aa, Giardia intestinalis
MTARLAPDQVLWIFNTISDKCIVLLAEHRIADKILFPHWHNPNRTSMLLVVFYLVLSALAAACKQAQNCVEDKCEMIGDTEICTQCTAGKVPIDGVCTAVGSAAGKCTKAEGQAVDDTDKTCGKCVDAYFMYKGGCYLAGAAGPGTGTKMCKQAAGGKCTQAADAKNYFIPPANTDDTHDSVVWCGDEIGVTLSSTQYKGVAKCLVCDAPGGAGAATCTTCEDGYFGATCEKCHESCRTCEAAEENKCKSCTDGYFLGATNGAAGKCLKCNSKTEEGWHGVDNCAKCTSSNTQNTPATCTECVANFYLKPAADATPSSCVTETGCGDGYFPTIVDEVKKCIACSAATNGGIDDCKKCSLKTTSAKAGVEIVCTECNTKWLSPLRDACLDSCPPGTHADSGNICPLCHSTCAECDGNAGANFCTVCYPGFVLKRGETGNMGMCVPECTGEYAENCEADQCTAVIGSSKYCSRCKVGFAPVDGVCVSTASRAVTGCTAGNDGTCTACTGTYFLQSGGCYQSTTYPGNTLCSIAASGKCTTCANGQTADSNLGSCPACPAGCSKCATSGSPKACSECFPGYYKSGDSCARCDTNNSQITGVANCVSCAPPSNGQGSVICYITRQETDDGTGDNTGGSTNKSGLSTGAIAGISVAVIVVVGGLVGFLCWWFICRGKA

SEQ ID NO: 473 - protein, 419 aa, Giardia intestinalis
MLLIAFYLGLSALAAQCKQVQNCAAGKCEMVGGTEICTECATNGNVPINGECTPKGNAADKCKKVNGNELVDDKTCGKCENTYFMYKGGCYQLGSDVALLICNDQAASPGGRNAVAGVCTECNATGGFFKSPEAADTTDSCISCSDTTGVQVNGGNTYKGIENCVVCAAPERGTGNENKIAACESCLEGFFVASNKAVCTRCTDNDNCAKCDAGENKCTKCKATASKPYLKKGETEDSNTCVNSNECTTDKTYFTDDTDDPTHGKMCKKCSEGIADCKKCAPSSPSALATVSAIVCTECTTQTNKPNVAGTGCFTCSVDGCSNCSENDVCEKCGPNKKVSPGRKSCVDSCPENSIDDNSVCTCSSGYSPDSSGASCVSTGSNRSGLSTGAIAGISVAVIVVVGGLIGFLCWWFVCRGKA

SEQ ID NO: 474 - protein, 593 aa, Giardia intestinalis
MLLTAFCVMASVLAATCTVEANTRDCAESKCEMVGGTEVCTECKYAGNVPINGVCKQKGDSAVTTSGCKKEDGTGLAEDKVCERCEDAYFLYKGGCYSVDNEPGQKLCIKAAEGACTEAAPGYFVPPQAIRSDQSVIACNDTISVQVLSGRSYMGIAHCTLCDSPKIASDPAPKPAVCTACEDGYFLGAAGDKESKCILCGDTSGSTWKGVDGCLKCTASGKADTPATCTECQEGKYLKGGDPTSCILRNACTGTHFPNDNAENKKKCLPCGENANGGIENCAECSLLSSVSGSATVLIKCSKCGSDKKLSPLKDACLDSCPVGTYDKQSVCTPCHSSCASCTDTTSTTCTACYSGFVLSAASGASAGTCIQECTGQYAENCADGQCTAIVGGSKYCSRCKAGYVPVDGVCVSTTTRAVTGCTPGDGVCTACTGSYFLQSGGCYQSTVYPGNTLCSSANNGKCTSCTNGQTADKNSGSCPACPDGCSKCTGSASPQQCSECLPGYYKSGDKCVKCDASANGIVGVPNCVSCAPPSNGQGSVTCYVNGSGTSRADANRSGLSPSAIAGVSVVVIIVVGGLAGFLCWWFIGRRKA

SEQ ID NO: 475 - protein, 739 aa, Giardia intestinalis
MFGSFVLAGVLVQIAWAGKATERAQEAQCADNTNCAAEACNVLIGGKLYCSRCNTGFVPINGQCADKEGATDKCKDGSGGDTADQTCGQCAEQTFMYKGGCYEAAQQPGQTMCQAADAGVCTQAAQGYFVPPGADASHQSVIPCGDEEEITVKNDKKYKGVLHCTRCNAPTEAADANAKAATCTACQADRYLKTAKDQATSCVTEQECTGTEGFFAKNGGTKTCEACAETCKTCKTEAAKCTSCKDDKPYLKKDNGSDTGTCVTEAECKTGNTHYPDDTEPKTCKTCAEGTSDGCATCEKGADGAVACKTCGNQKKVQPNKKGCVENCPSNSNDKKTPGTCECVEGYVPEEAGTGCTKKPDPPAAPCNTPGCKTCSEPKTSKEVCTECEDPKALTPTGQCIYGCEHLEGYYEGTSEGGKKACKKCEVENCLLCNENGQCETCKDGYYKKETACAKCDTSCKTCANGEPNGCTSCEAKKALSYEGEGNTGTCKSECKPGTNNCEKCELTVDGTAYCSKCKDANQFPQNGVCSAAAGKAITCTTKGTGVCDKCANGLLRMNGGCYETTKFPGKSVCEEAASAGDTCQVEAPGYHLNNNDLVTCSAGCKTCTSNTVCTECMDGYAKTDNKCTKCATGCATCAGSASNCDTCSTGYYKYKNACVSCTESNSDKTITGVANCANCAPPLNNKGSVLCYLVQSGENTNKSGLSAGAIAGIAVAVIIVVGGLVGFLCWWFMCRGKA

SEQ ID NO: 476 - protein, 596 aa, Giardia intestinalis
MLLIAFYLILSTFAVDCKNSGNSCEAGQCDTIGDTEICMQCNQGKVPINGICTAHSEEAVTNAGCKKNGGTNIEESDKVCGQCGNGYFLHKGGCYKIGEAPGNLICADEASNPGARTAGVCGACKDGYYKNSDAVATADSCIACEDANCATCGGAGENKCTKCIDGYFVGATGNEGGCIKCDATTGPNSYKGVAGCAKCEKPKNAGPAKCIECAADYLKTEADEQTSCVSEAVCREGKTHFPTTDSAGGNKKVCVSCGTTNNGGIENCGECTSKESAARAGTEITCTKCSSNNLSPLGDACLTDCPAGTYAVSGDSGSVCKPCHNTCAGCQTDDRETSCTACYPGYSLLYESNGATGRCVKECTGAFITNCADGQCTANVGGAKYCTQCKDGYAPIDGICTAVAAAGRDVSVCTATGGKCTACTGNYALLSGGCYNTQTLPGKSVCKAVANSNDGKCKTCANGQAPDPATNFCPLCDSTCAECSTKNDADACTKCFPGYYKTGNKCIKCTESSNNGKKIDGIPDCLSCEAPINTGPVICYVKTDGTSDDNSGNGGDSTNKSGLSTGAIAGISVAAFVVVAGLVGFLCWWFICRGKA

SEQ ID NO: 477 - protein, 140 aa, Giardia intestinalis
SFCTNAAGGVCTQCAADHFLQDGGCYKLGRQPGVQICAAAGPNSLCTTCVNGQRPDTNTGACPVCPTGCDTCTGTSSRAPECQSCLLGYYFDSDKKLCVKCTENSSAIQGVSSCVSCAPPSNNQGSVVCYLINDSGSTNK

SEQ ID NO: 478 - protein, 147 aa, Giardia intestinalis
SGCKASGGKCTECGANYALLSGGCYNTQKLPGSSVCTAAQNKGQCQTCANGQSPAGGKCPACTEGCVKCAGSKETCTDCLAGYYKTIDNKCVKCTASSGDNNQITGVENCISCAPPAGGSGPVTCYVTQQKADDGTGGDTGGDSTNR

SEQ ID NO: 479 - protein, 139 aa, Giardia intestinalis
ECKTPANKGGCSVCASGYFLLDNGCYKTDRQPGSQVCKTEGSGKCTKCANEQTPDQQGSCPACPAGCSKCSDANTCTECLAGYYKTSANTCVKCDTDDNTIKGVPNCVSCKEPSGGSGTVTCYVTQTPAVNPTDPSVNK

SEQ ID NO: 480 - protein, 143 aa, Giardia intestinalis
ECKTPANKGGCTTCASGYFLLDNGCYKTDRQPGSQVCTAETGGKCTQCANGMTVNSQTGVCPSCDSSCKTCGATAASECASCFSGCYLDSANACKKCSENSADNKITGVKDCVSCDPPSGSGPVTCYVTQTPAIDPTDPSVNK

SEQ ID NO: 481 - protein, 520 aa, Ichthyophthirius multifiliis
MQLENNGDTKFIGSHWKELILFNELMAAESSGKDSQLSVFTIALLRDTGYYAEVNESMADDFQSGRNRGCDFVLKACQSDTQYPEFTQKKYSPDQCTSKNNGYGKVKQIDLYDNCKTVQNTFYCEDSDLNNYVNNFSFQYFGVNSKCLKSTSIQGNNKFQYSNARCHLVQCSPDSTQITITFTQQALQLLLCTKQDQGKEIQVVKGQPEFGYITCPDNYREFCNYTPECPNYCSRKGICILGQCRCSSRWSGADCNISLKNCPYFTLEEDPQKCVQQCPSDKFPNPDKVCRSNCPKSFYFSNYRNDCVECNYQCLSCSGPSKNQCLECGISKYLEEGQCVNQCSSNFILVNQRKCVKSVDQGCEQECERCDSENKVICTKCKDQYFLNLKTGKCVVANNCPQETFANEENNTCQICELTGCIQCISQTVCQVCDEQLGFFKKGDQCAKCPQGCQKCSSDLQSCTVCYSGLFLQERNCDIDCPSNKFQDQKKRECIPISICKRLFLFIKQMYKTMSQIYFQ

SEQ ID NO: 482 - protein, 1239 aa, Ichthyophthirius multifiliis
MGNNSKYKIPNPQQLSLSNKYTIDSALINVVKSQNIIFNNQYYAFYKNDFFDDDCEQVPISQNDVYEISRSCSTNKIVIFHSTDGRLGIMIYKGKKYIMSEFPEYKCILEIDDNIGLIMKSKQIISLSQFTYSGDTVTLNSKISLNSSEFYLSDILDFGIGKKIICLGNNGAWEFYDLLTFTQVYLTNDSSPIKFGKYYDILTYESIIFFGNIVYDISYDSVLNRIRVIQRADQKNKYYTLPINDHKFRQSFKKGQTLIVDDENHNDQYLYIKTIENIICNDNEYINSNLKCIQCKINEIFEGDKCVACPEGTFKLNNSDRICTECMRAMKGCISCTNLTSCTKCDKDTSIFNNPKCIACNSTCHTCEDAISCKSCADGKFLNTNTQLCEECDNSCATCTDKTKCLSCSSPLYLQQLEKKCVTECYPGYYLNTSKICQKCNRTCATCKNGASCTTCLSDHLKNEQNKLCDLLCDRTCKTCLFSKFNCLTCNDPYYLQTNHTCADSCLPNEYPDDTKTCQPCNISCLTCINGTSCSTCTDSMYLDSVTKYCKPCTTVNCKTCDNPSQQCTECNLLYYLTQDNKCVDNCQFDQHNTYGDAQRKCQLCNATCFTCQNAFSCDQCNIGYYINTISALCEKCNDNCKTCENGIVDNQCISCNNPMVLLQTKQCADVDVDLDVDIDADADNDANANKCNSKQYLDVNQICQQCDSSCNSCSNSSTCNSCVEGRYLVISTSKCDFCDLNCKACIEKDKCQSCVQNYFLTQNKQCKQECDQYTFPDSNGICQSCPSNCLNCKQFNQCIECFYGFYLYNGLCIEEVICYGNTYLEQNECKTECSQRKFKNFANNRCDPCHITCKKCTEANKCLECENGLILNDDSKCEQQLQETNATSKLIFKIYLATTIYTFISCIICHFLDNRSINSGEKECKPKVAKTQIINVENQVVVEDIISNENKIQNFQKQIQKNKQINQNKIILNFKKNNNKIDINSRKKSYFTNQTKISPISPEIDMIVFRNFKTKQTQQKTMNNQNGSTVIKFNDPNNYRNSINTITSQININPDQYNYDQKIYFTLIANEFLEVYMLQDNSPNSVLRVLLMYFKQCLIMLISFYQFIFGYFIICILILMCVLIKGILKKIIEKFNFLNCYRYIVSKIFFLVIYSLFFIFFIFKQCSIITNDKDYKWSVYYLSIFIIDFIFIQNIISFLNYCSSVRKIKGFNDKLQLFLNYTFVQQNIINEIKTNKLK

SEQ ID NO: 483 - protein, 116 aa, Giardia intestinalis
LLVCATVLAKDSGKDTCFPGYTLNTDTKQCTKDPEAPCNVEGCETCVEGNAQQCKTCRPGYTINTDTKQCTKDPEAPCNTPNCKTCDNPKTDSEICTECNDGNYLTPTNQCVPDCT

SEQ ID NO: 484 - protein, 709 aa, Giardia intestinalis
MFGRFLLAIVILQLARTACTQEADDGKCKTCGVTIGQEQYCSECNGANYAPVNGACEDVETQADKKALCKAHASGACTTCGGNSFMYKDGCYSSGEGLPGHSLCLSSDGDGVCTEAAPGYFLNPLRANTKDSVVSCSDTTGFTDSGKTYRGVQYCERCDGAALTDAAGGDAKCTRCGQDKYLKDNTCVDKAQCDSGSTNKFVAVDDSENGNKCVSCSDNLNGGVANCDTCSYDEQSKKIKCTKCTDNNYLKTTSEGTSCVQKDQCKDGFFPKDDSSAGNKCLPCNDSTDGIANCATCALVSGRSGAALVTCSACTDGYKPSADKTTCEAVSNCKTPGCKACSNEGKENEVCTDCDSSTYLTPTSQCIDSCAKIGNYYGATEGAKKICKECTAANCKTCDGQGQCQACSDGFYKNGDACSPCHESCKTCSAGTASDCTECPTGKALRYGDDGTKGTCGAGCATGTGAGACKTCGLTIDGASYCSECATATEYPQNGVCSSTTVRAAATCKAGSVAKGMCNSCTNGFLRMNGGCYETTKFPGKNVCEEAAPAGDTCQTPADGYKLNNGALITCSAGCKTCTSQDQCDTCKAGYAKTGGNTKKCVPCATGCSECNADDATKCTVCAAGYYLSKEKCIACDKSDGGSITGVANCANCAPPTNNKGPVLCYLIQNTNRSGLSTGAIAGISVAVVAVVGGLVGFLCWWFLCRGKA

SEQ ID NO: 485 - protein, 645 aa, Giardia intestinalis
MLVGFLLVCATVLAKDSGKDGCEKASNTDCGEELKRAGCATCTAVGPNGQTCLTCNGGQKVQLNGISCGDSCPSNSAANPDICECNEGFNLNSGKDGCEKASNTDCGEELKRAGCATCTAVGPNGQTCLTCNGGQKVQLNGISCGDSCPSNSAANPDICECNEGFNLNSGKDGCEKASNTDCGEELKRAGCATCTAVGPNGQTCLTCNGGQKVQLNGISCGDSCPSNSAANPDICECNEGFNLNSGKDGCEKASNTDCGEELKRAGCATCTAVGPNGQTCLTCNGGQKVQLNGISCGDSCPSNSAANPDICECNEGFNLNSGKDGCEKASNTQCNTPNCKICDNPKTDNEVCTECNDGDYLTPTNQCVPDCTTISGYYGDNDKKCKACSPECAECVGPANNQCSSCPAGKKLTYTDDSNPNNGGTCGDACKVSADGTGCETCGAQIGGTAYCSKCKTSTQAPLNGDCAASSRATFCTKMGNGVCTQCEDNYFLKDGGCYQTDRQPGKQVCSNAQGGNGKCQTCANGLAATDGNCAECHPTCATCSAPSTASSCKTCATGYYKENGDDTTDGPCMKCSEKISGCKQCVSSSGSSVICLESEVGTGGSTNKSGLSTGAIAGISVAVIVVVGGLVGFLCWWFLCRGKA

SEQ ID NO: 486 - protein, 132 aa, Giardia intestinalis
PKCDTSCKTCANGEPNGCTSCEAKKALSYEGESNTGTCKSECKPGTNNCEKCELTVDGTAYCSKCKDANQFPQNGVCSAAAGKAITCTTKGTGVCDKCANGLLRMNGGCYETTKFPGRASVRKQHRLGIPAK

SEQ ID NO: 487 - protein, 713 aa, Giardia intestinalis
MFGRFLLAIVILQLARTACTQEADDGKCKTCGVTIGQDTWCSECNGANYAPVNGQCVDVNAEGPSKTLCPQHSAGKCTQCGGNSFMYKDGCYSSGEGLPGHSLCLSSDGDGVCTEAAPGYFAPVGAANTEQSVIACGDTTGVTIAAGGNTYKGIADCAECSAPDATAGAEAGKVATCTKCGVSKYLKDNVCVDKAQCNSGSTNKFVAVDDSENGNKCVSCSDNLNGGVANCDTCSYDEQSKKIKCTKCTDNNYLKTTSEGTSCVQKDQCKDGFFPKDDSSAGNKCLPCNDSTDGIANCATCALVSGRSGAALVTCSACTDGYKPSADKTTCEAVSNCKTPGCKACSNEGKENEVCTDCDGSTYLTPTSQCIDSCAKIGNYYGATEGAKKLCKECTAANCKTCDDQGQCQACNDGFYKNGDACSPCHESCKTCSAGTASDCTECPTGKALRYGDDGTKGTCGEGCTTGTGAGACKTCGLTIDGASYCSECATTTEYPQNGVCAPKASRATPTCNDSPIQNGVCGTCADNYFKMNGGCYETVKYPGKTVCISAPNGGTCQKAADGYKLDSGTLTVCSEGCKECASSTDCTTCLDGYVKSASACTKCDASCETCNGAATTCKACATGYYKTASGEGACTSCESDSNGVTGIKGCLNCAPPPNNKGSVLCYLIKDSGSTNKSGLSTGAIAGISVAVIVVVGGLIGFLCWWFLCRGKA

SEQ ID NO: 488 - protein, 687 aa, Giardia intestinalis
MLLTAFYVVLGSFAAPCQQDGDHIVTCQVNKCETVGLFEICTECKTGGVPVDGFCRPFGSIQAAAAGCTKADGTALDKTATTCGKCGDGYFLFMGGCYKTESQPGSEICTTASNGLCTACKVDSQYIFQNKATPSEKGSECILCWDTTDRNGVMGVANCATCTAPASSTGPATCTECMAGTYKKSDTECAACHSDCATCSGEANNQCTSCETGKYLKSNQCVEKNTCNTNHYPDDTSMTCVACTVLDANCATCSFDSATAKGKCLTCNSNKIPRTTLDGTSTCVENSYAGCQGADNELFMKEDQSACLLCGDTKEASNDKGVANCRTCTKNANDSPPTCTACLDGYFLERGSCTTTCADNCATCSEATTEDKCKICKAGFFLASPGEGKCISCSDTNNGGIDGCAECTKEPAGPLKCTKCKPNRKPAGTSDNYTCTEKTCEDPTVCGGTSGACDAIVIDANGKEHYYCSYCGETNKFPIDGLCTDNKGTNAGCTDHTCSYCAAGFFLYMGGCYKIDTVPGSYMCSKSTTAGVCDTPNANNRFFVVPKAISAEQSVLACGNPLGTIAGGNAYVGVEGCSQCTAPDARADGGMAVATCTACEDGKKPGKSGTGCVACPDANCKSCTMDDVCEECADGFSLDNGKCVSSGTNKSGLSTGAIAGISVAAIVVVGGLVGFLCWWFICRGKAQ

SEQ ID NO: 489 - protein, 667 aa, Giardia intestinalis
MLLAIFYFVISTLTAKCTTQTQTCEAEKCEMVGETEICTRCQTGKVPIDGKCVDATANANCKNASGDGDANQVCGKMSSVPGNTLCTTVSPDGVCSVAANEYFVPPNADATHDSVVSCSEETPIHLANNKQYIGVAGCATCSAPKAPGEDNTPKAATCTKCAAGFLHTPSEGLSSCEETCPEGYFGHTATAESKKTCKSCTGGSSEAPNVKGIGDCLKCMYNEASGNTLTCEKCSAQKKPSLDKTSCNDCTGQNCAFCSSSGGDCEGCDSGFILDGQNCVKSDCKTENCKACTNPKAANEVCTECISTHHLTPTSQCVQYCQALGNYYAGTNADNKKACKECTVANCKTCNDQGQCQTCNDGFYKNGDACSPCHESCKTCSAGTASDCTECPTGKALKYGNDGTKGTCGEGCTTGQGSGACKTCGLTIDGASYCSECDTQNEYPQNGICTSTTARTVATCKNSNVANGICSSCTNGFLRMNGGCYETTKFPGKSVCEGANADADTCKAPVPGYKVEAGKLVMCSKGCDTCSDATTCTKCGDGYTKIENSQTCTKCDSSCETCTGAATTCKVCATGYYKTALGESTCTSCENDSNGVIGVKGCLNCAPPSSSTGSVLCYLMKGENTGGSVNKSGLSTGAIAGISVAAVVVVAGLVGFLCWWFICRGKA

SEQ ID NO: 490 - protein, 596 aa, Giardia intestinalis; identical to SEQ ID NO: 476

SEQ ID NO: 491 - protein, 1609 aa, Giardia intestinalis
MHTWILTLLMCTCSNRHHYLHNSNHYLKGGALCRLAAKAGTAERILFSDVSDCPENCTSCTDPYICEVCDHGYTLTNRGRCVDLCIEGDSETNCAVGHCTVFDDTLCSKCAHEGDVPAAGVCNTGVTTCVKDSHGICISCESGHLLYRGGCYPSKSALAQSICATDNQIVVEGMLYCSLCNDENEAPINGHCTDEHSSYCDAESGQCINCVAGGYFLFNGGCYNADEHPGSAICAEVRDGECTECGSHYPVTDGVCTYCPVDHCLLCENESCTQCQQGYVLRSSGRCVKLCSEGNGLQSCAIGHCTAFEGTLCTKCAYEEDVPVAGICTSGLTTCQKNFSQICISCEGEHLLYSGGCYATTGSYGLQICSIENQIAIGGKVYCSKCNQKKEAPLNGECTEAAADHCDVRDGACTGCKTTGYFLFQGGCYTLASIPGNIICAEVSGTTCIKCRDGYGIHEGECSPCTIAHCLDCKSDVATCNACDPKYFFTGTACVACEGEHCAACRDNMCVDCTDKTECNACAIPNCVLCDPALTECLACQEAYEPGEDGFCTPLPASECPLSCLCADQDVPALCTSCKPGFIAAGVVSGDTCLSCALEVEHCGLCSYIPESDSIVCEECLDGYRMDDGLCEPCGNGCKSCPHRANKCAECFAETPYFNPALTECLSACPPNSVAATNKKCSCIHGYYSTLQGCEKCDESCDTCSGGEIDKCVTCRSGFFLASGSWKGQCIPCDLSSFSDGSVIGVEHCIDCRGVQENGDLIVVCKECDLGYTLKGEVCVLDDSGHEDCPSNCICTDVSPTCVSCQRGYFTLSTPSAENCVRCSSAISGCKTCTVEGSSLRRSTSKVTCTLCDDGKGLVEGTCHSCHVTCKTCNGDPELCSTCYNPAYKLSLRSDQCVPECPEFSEEQNGRCVCLLGYSISFNGLTCVKDSSACPSICTCAVGNICSGCADGYFTFDPSRTDAARCEPCSGDFCSSCGRVPNDATFFGHTFSPGRRYAYRRSLESVNICIECADKQGCSACSIEGCNRCSASEHTKCTECMPDYQLSQDKKSCIALVPICPLGCTCVPGTSTCNGCADGYFEVDPTDEASGRCMRCSIPTRYIPTRISGARRLERLLSIRRKRTDSISLQIVRDASWNGVAGCAMCTTPSSPGPAICTQCVQGKHLLVSGESTQCLDACPDGMGSINNVCFNCNDENCLRCDENLDSCVECRPGASPTLTPDTELVVCETVCPLGCVCEDAEDSSICTGCQSGYYEVSVLARFIMRLRKTDVHCKKCLANCMTCTDESTCLVCADGYILHQTDASCVEKCDQGYYNKQGQCAPCTGEHCTSCTNETTCTSCTDSSFLSNGECVTCSTSCKTCGGGTENDCLTCPTGTVHSTGTGLGSCLQECSATAAGNCAVCNAIIDGTRYCSKCTPGEAPINGRCEPVSAARNVMCITSGDGTCESCSGGLFLFNGGCYATSRYPGSAVCTSSSDGLCTNCADGFTNTNGICSNCVLGCSSCSSTAASACTSCTEGFFPAFSGSQGVCKRCDDTTITDGYQGVQGCRICIAPQQAGIALCLDSSEAGNKSSLSAGAITGIAIAVFAVIGCAVGVLVWFLCCRRSKAV

SEQ ID NO: 492 - protein, 1906 aa, Tetrahymena thermophila
MFQTQRIDSIKITLITRQISTNTEIQQQCGNSYDYYQQEYQLEELHQKNNIIFYPKLKQTRILNGYGGGGQWGGNGGGGNWGGNNQCPNGCNCQRWKECTSCQSGFYNDNQQSRGRRSQTYSCQQCDQSCQECQGGSKQDCTSCKQNLFLAQDGSCQTCNTAQGYYISDGKCLKCDNNCLTCQAQSTTCISCKSPQILNLSSQCVNCDQNNGYFVSPQNICNPCDASCLTCSGPNKTDCNSCKTNFILSNKQCITCDTTNGNYLNNGQCTKCDPSCKTCNGSNKNNCITCQLNTYLRTDNTCQACDVQNGYYLTSSSICKQCNSSCKKCNGDNSNNCLSCYPNNYLKNDGTCSDCTDSKYFKDQTQMKCLPCDPSCLTCSNSNSNSCLSCPSGKYLYPDNSCQDCQTSNGYYIDTKTNPSIPRCQKCFSTCQACVDAGQSSCTACKPSYLRMNPYSGTNFKCIQCNTSLGQYTTSSGGTQTDCFNCHSSCKTCTDGNNKSCTTCADGLYFVQSGMDKLCQSCQINGQQFVDSNFFCQNCSSQCLKCQGNANTCTDCQDGQYLKKLDNTCGSCGDGFYINGSFCLKCDSSCKTCNGDKQNNCLSCSGSLNLNSINQCVDQCPEGTFALSNVCQACDPSCATCSQAGKCSTCPDGQYIFNDALCQTCPSNYYGDNASKSCKPCDSSCLTCNGPSSSNCLSCPGDITLQSGTCTSQCPSKYIQKNNQCLQCDISCNSCFDVDEYSCISCSNSNYAFLQDKGGKKKCVDCSQQSYYFKQGNDCLPCHPTCLTCNRQNDPNKCLSCPIGKFFQKDDQSCSDCTKRGYYKSSSLCLKCPINCDKCSVQGSNLICDLCSNPYIRDQTLTQCVLCSGDISFYYSPDDKICKKCDSSCKTCIGGKDTDCQSCFNGMNLLISEKRCIVCGDGYFINSPGKCSACIQNCRQCNDQSTCQVCNTSNSQPIYLDENKQCVSSCDQNGGYFIQNDGVLKCLKCDTDCQQCQSKNLCKKCMNNTSLILQTNNVDVKCGVCNQNNYIDPQDQFCKKCDSSCLTCSGPLSTDCLTCDQSQNLYKQPDNSCSTCTGNFKIVGQNCVQCDPKCNGCDSTGCKSCASGFYFVEGSKQCNTCDIQNGKFIQNSLTCISCNSKCKTCSGPSESDCILCNGQLTRDINNQCVVCNVDNGFYIDSINQRCLPCAQNCKKCTGPSIGECTQCAKDLYLSNDNAGNQVCQECNIQNGYFISINKCLKCDSSCKTCNGTSSSECLTCFTGYFIIGSNKSCVQCPTEDQNNIIRGSIRSGNYVLLQKCNKCKQDYILQEDPNACISGCNDIGENLVFNTVTKQCECQSQMYYYNIPNKANQQIQSIFCSQQPIDGYFCNQNKKCYQCNSNCKVCQSRFSCSQCESQYYLWQGQCIQKCEDSQGLIVNSDNSLTPSNLCICKQGYVLREQDKICVLKLQIISLKLTIQNDNNLLTITLNRAPFNDESQDLKLLIDPQTMKLSQDYFIKSMSIIDNKIYYEIQVTQNRKINTIQVTLNKQINTLSLSNTILTTEEFNKSNQSSQQRNQNINDASQILVPDSGSAQKVLGPIAMFKDNIPQSIYTYSLLGDSFIFEAIPSFQEVNCQISSESTTNQSNNDNQSEQYDSDQLKILTQFGLQKFLYSNFLFPHLSLVLCTVLVFLNLFARAIMKGKQYTMQIVNILLNVMSNLNQGYITPTIFSIYFSLQFSESRGLAVFQAFIHLFFFIEITYILFKKDNEYIENHIPNFLVNINFKAKGMFQEFSVGITFVMISITSKKYTEIMGSTTISNEDLSSIEKQSVIILFMLLACLGISLILFLIRLFISLLQVFRQIKAFFKKRSNSSLLSLQNEQMLQEIFQTNQKNKFPTIKYIKQQKYVELQHTKQVNLVSFQDTHN

SEQ ID NO: 493 - protein, 718 aa, Tetrahymena thermophila
MDYLVCQQNNSYVNQQNQQCSPCSSNCTQCDNFTKCNTCASGYYFSTTLEFQCVKCSDPCKECTSSTICTACYSQYYLNGNTCTNCQSPCLTCTSASECQTCQDGYYISGSQCMRCVSPCLKCSSSSSCSSCSFGYFLSGTTCQQCDSICTSCTSNTNCQSCSDGYFLNNNQCNQCDPTCTKCTSSSSCSSCQSEYFLDANNKCSKCQLNCIQCQNLQSCQKCQEGYFLDNQNCQKCTNNCQTCSSSTYCLSCLSGYYLQGNSCILCNDKCTQCTSSQICTSCKDGYFLNQGQCQKCDSSCSKCTSLSYCSACSDGYFLNQGNLCQQCQPNCTQCQDSQTCSQCQSGYFFDTLSRKCTKCINNCQTCSSSTLCITCLQGYLLSSKSSCFKCIEFCSTCNENLICPSCFDGYFLDKNSCQKCLQNCAQCNDSQTCTQCLKGYNLYDNLCLTSEQCPSGCKLCQDNFSCQTCLDGYVKQNQQCIKCSVENCSFCDQQQRCFQCKSGYKLLNNSQICVKDCGVGHYLSDNNECLACDQTCFTCKGPTDTDCIICKSNLYLSVSSLKCTSCQDQQYLDNQNNCQSCFSICETCYGPSSNQCIICKNQLVKSKISFECITLDQYQSEELQYYFKNGFECSEIQNKNLTQKCEEQLEFSKFTCWIDVIFMFSYFCQFVKIIQHLLHLDIANIRIQCLFLKTDSLMSLILQQSLKFYIIQTIKAR

SEQ ID NO: 494 - protein, 134 aa, Giardia intestinalis
  misc_feature (127)..(127): Xaa can be any naturally occurring amino acid
IDGASYCSECAVDTEYPQNGVCAPKANRATPTCSDSPIQNGVCGTCANNYFKMNGGCYEIAKYPGKAVCTATQAGGTCKTAADGYKLDSGTLTVCSEGCKECASGTECTTCMDRYVKSTRICTKCDXSCETCNG

SEQ ID NO: 495 - protein, 137 aa, Giardia intestinalis
  misc_feature (44)..(44): Xaa can be any naturally occurring amino acid
IDGASYCSECAVNTEYPQNGVCASATARAAATCKTGNVAKGACXSCTNGFLRMNGGCYETTKFPGKSVCTTTPGTDTCTSMASGYYIDGSNNLVVCSDGCADCTTPSTCTTCKDGYTKIGSGQTCTKCDPSCETCSG

SEQ ID NO: 496 - protein, 218 aa, Giardia intestinalis
MFGRFLLAIVILQLARAACAQEADDGKCKTCGVTIGQDTWCSECNGANYAPVNGVCEDVETQAYKKALCKAHASGACTTCGGNSFMYKDGCYSSGEGLPGHSLCLSSDGDGVCTEAAPGYFAPVGAANTEQSVIACGDTTGVAIAAGGNTYKGVADCASCAPPSNNQGPVLCYLMNGDSPGGSTNKSGLSTGAIAGISVAVIVVVAGLVGVLCWWFLC

SEQ ID NO: 497 - protein, 594 aa, Giardia intestinalis
MLVGIGLIFAVALTEVCSPSIDGCAECDSTGQGCTKCDANGNTPYLKKTNPSDPTGTCVSAVDCQGSAGYYTDDSVSDAKECKKCNAPCTACAGTADKCTKCDANGAAPYLKKTNPSDPTGTCVSAVDCQGSAGYYTDDSVSDAKECKKCAEGQKPNTAGTQCFSCSDANCERCDQNDVCARCSTGAPPENGKCPAATPGCHSSCDGCTENAMTNQADKCTGCKEGRYLKPESAAGQSGTCLTAEECTSDTTHFTKEKAGDSKGMCLPCSDATHGIAGCKKCALKTLSGEAESTVVCSECTDKWLTPSGNACLDNCPAGTYPNDNNLCTSCHDTCAECNGNADRASCTACYPGYSLLYGSCTAGTCVKECTGAFGANCADGQCTADVGGAKYCAQCKDGYAPIDGICTAVAAAGRTNVCTAADGTCTKCAGEYTLMSGGCYGVAKLPGKSVCTLASNGKCIMCAANGQAPVQEKCPECSEGCAKCNDSNACTECLPGYYKGAGDKCFKCTASSGNNNQITGVANCVTCAPPAGGSGSVTCYVKTDGTSGGDDNTGGSVNKSGLSTGAIAGIAVAVVVVVGGLVGLCCVICRGKA

SEQ ID NO: 498 - protein, 769 aa, Giardia intestinalis
MRSRFRWSLCSTEFRDMKQGSVRLLMQTRAVLCQLLASMLVGIGLIFAVALADACSPSIDGCAECDSTGQGCTKCDANGNTPYLKKTNPGDQTGTCVSKEDCTRTSYYATPTDPNAKECKKCDATCAACSSGLATACTKCEAGGATPYLKKTNPGDQTGTCVSKEDCTRDGGYYADDTTDPNAKECKKCDATCAACSSGLATACTKCEAGGATPYLKKTNPGDQTGTCVSKEDCTRDGGYYADDTTDPNAKECKKCDATCAACSSGLATACTKCEAGGATPYLKKTNPGDQTGTCVSKEDCTRDGGYYADDTTDPNAKECKKCDAGQKPNTAGTQCFACPDSNCERCDQSDVCARCSTGAPPENGKCPAATPGCHSSCKDCVTGANTSEDDKCLSCSGDNYLKVTDTDAHSGVCVSASACTSDTTHFTKEVADSTGSKKMCLSCSDATHGITGCKKCALKTLSGETESTVVCSECTDKRLTPSGNACLEQCPAGTYADNINGVSVCASCHATCAECNGNADAASCTACYPGYSLLYGSGTAGTCVKECTGAFITNCADGQCTANVGGAKYCAQCKDGYAPIDGICTAVKTGRDASVCTAAGGKCTKCAGEYTLMSGGCYGVAKLPGKAVCTTANNGKCTMCAANNRAPVQEKCPECSEGCAKCNDSNACTECLPGYYKGAGDKCFKCTASSGNNNQITGVANCVTCAPPAGNAGGPLTCYIKTDGDNTGGSVNKSGLSTGAIAGISVAVIVVVELVDFLCWWFVCRGKA

SEQ ID NO: 499 - protein, 1274 aa, Giardia intestinalis
MLVGFLLVCATVLAKDSGKDTCFPGYTINTDTKQCTKDPEAPCNVEGCETCVEGNAQQCKTCRPGYTINTDTKQCTKDPEAPCNVEGCETCVEGNAQQCKTCRPGYTINTDTKQCTKDPEAPCNVEGCETCVEGNAQQCKTCRPGYTINTDTKQCTKDPEAPCNVEGCETCVEGNAQQCKTCRPGYTINTDTKQCTKDPEAPCNVEGCETCVEGNAQQCKTCRPGYTINTDTKQCTKDPEAPCNVEGCETCVEGNAQQCKTCRPGYTINTDTKQCTKDPEAPCNVEGCETCVEGNAQQCKTCRPGYTINTDTKQCTKDPEAPCNVEGCETCVEGNAQQCKTCRPGYTINTDTKQCTKDPEAPCNVEGCETCVEGNAQQCKTCRPGYTINTDTKQCTKDPEAPCNVEGCETCVEGNAQQCKTCRPGYTINTDTKQCTKDPEAPCNVEGCETCVEGNAQQCKTCRPGYTINTDTKQCTKDPEAPCNVEGCETCVEGNAQQCKTCRPGYTINTDTKQCTKDPEAPCNVEGCETCVEGNAQQCKTCRPGYTINTDTKQCTKDPEAPCNVEGCETCVEGNAQQCKTCRPGYTINTDTKQCTKDPEAPCNVEGCETCVEGNAQQCKTCRPGYTINTDTKQCTKDPEAPCNVEGCETCVEGNAQQCKTCRPGYTINTDTKQCTKDPEAPCNVEGCETCVEGNAQQCKTCRPGYTINTDTKQCTKDPEAPCNVEGCETCVEGNAQQCKTCRPGYTINTDTKQCTKDPEAPCNVEGCETCVEGNAQQCKTCRPGYTINTDTKQCTKDPEAPCNVEGCETCVEGNAQQCKTCRPGYTINTDTKQCTKDPEAPCNVEGCETCVEGNAQQCKTCRPGYTINTDTKQCTKDPEAPCNVEGCETCVEGNAQQCKTCRPGYTINTDTKQCTKDPEAPCNVEGCETCVEGNAQQCKTCRPGYTINTDTKQCTKDPEAPCNTPNCKTCDNPKTDNEICTKCNDGDYLTPTNQCVPDCTAISGYYGDTDKKCKACNPECAECVGPANNQCTACPVGKMLQYTDTNTPVNGGTCMDQCSVSSTNDGCAECGAQIGGTAYCSKCKNTQQAPLNGNCAASSRVAFCATITSGACTKCNEGYFLKDGGCYQTDRQPGKQVCSNAQGGNGKCQTCANGLAASDGNCAECHSTCATCSTADAADKCKTCATGYYKENGDDTTAGLCKKCSEKISGCKQCVSSSGSSVICLESEVGTGGSVNKSGLSTGAIAGISVAVIVIVGGLVGFLCWWFLCRGKA

SEQ ID NO: 500 - protein, 134 aa, Giardia intestinalis
IDGASYCSECDTQNEHPQNGVCAATNRRTMTCNNLGSGVCNTCANGLLRMNGGCYETTKFPGKSVCEGANADADTCKTPTPGYKVEAGKLVTCSKGCDTCSDATICTKCGDGYTKIGSSQTCTKCDASCETCNG

SEQ ID NO: 501 - protein, 137 aa, Giardia intestinalis
IDGASYCSECATTTEYPQNGICTSTTARTAATCKNSNVANGICSLCTNGFLRMNGGCYETTKFPRKSVCTTTPDADTCTSVTSGYYIDGSSNLVVCSDGCAECTTSSACTTCKDGYTKIGSSQTCTKCDSSCETCTG

SEQ ID NO: 502 - protein, 134 aa, Giardia intestinalis
IDGASYCSECATATEYPQNGVCAPKASRATPTCNDSPIQNGVCGTCANSYFKMNGGCYETVKYPGKTVCISAPNGGTCQKAADGYKLDSGTLTVCSEGCKECTSSTDCTTCLDGYVKSASACTKCDFSCETCNG

SEQ ID NO: 503 - protein, 370 aa, Giardia intestinalis
MLLPALCFLMSGLAAQRTKQPTSGCQVDNCERCVPSDETKCEACNSGFDLDENTKQCNPAPAECPIVNCQTCSQDKQTCVACEPGKHLTPTKKACLDACPVGTYLSGQTCAPATPPVRSAAGPALSKCTACLAGKMLRYTDETKLNEGGQCVEQCVEGPECETCGLTIGGTKYCSKCKGSNVPLNGVCTSNAARTQFCTTAADGRCSACAAGYFIQEGGCYQTTRLPGKSICTTDNGGKCQTCANGQTPDGGTGVCPLCDSTCKTCTAGQTQQCQTCFSGYYKSGTKCVKCDASDGQITGVTDCVSCAPPSGDSGSVTCYVKMDGSSGGNSTNKSGLSTGAIAGIAVAAVIVVGGLVGFLCWWFICRGKA

SEQ ID NO: 504 - protein, 557 aa, Giardia intestinalis
MFLLINCLIASTLAGACSTTQANCVAEKCEMVGETEICTQCKQNYVPINGVCEAAASSNTKCQKASADEASDQTCGKCLSTTFMYKGGCYDKTGNLGRIICKTEGSDAGKCGACNDEKGFFDNPDAANNVDSCISCGDATGVTIPGSSTKTYKGVAGCAKCTKPSQISENTGTKEATCTECNANLYLKAVSSPTSATSCVSAEDCKTGYFPTTDTTDSKKKCLTCSTADKGGIDGCSACELLPSTTRASTVLISCSACSTNNLSPLKNECMQDCPAGTYADSNVCKPCHTSCASCKGDNTESSCTACYPGSVLSYGTDNTKGTCIAECTGKYLENCADGQCTATIAGSKYCSKCKSGFVPVNGLCVSAETARAAPPGSTPDKTNGVCTACTEKYFLESGGCYQAEKFPGNTLCTTADAGKCTTCANGQDKDSNGSCPACPTNCASCAKDNTKTCNKCFSGYYLDTAKACKKCSETSGNIQGVENCISCLAPTSPQSSTPVTCYVKTSGGGSGDNSTGGDSGPNLSSGAIAGISVAVIVVVGGLVGFLCWWFVCRGKA

SEQ ID NO: 505 - protein, 374 aa, Giardia intestinalis
TRCMPGYFLKDGPPKTCVLCDDETSGIPGCAECTGGVGSLKCTECKPNYRPSGEPSDLTCTKTCEDETACGGTAGACDAIVVGNDGSMLSYCSKCVGAGYGPINGKCTNALAGNTCADGVCTRCTNNYFLYMGGCYDVSKAPGNLMCSAAPSGFCTTPVGRYFKIPGDSAAQQSVLACGNPVGATAGDKAYVGVLDCTACAAPQAPAANAMAAAVCSACDKTKKPNKDGSGCTLCAVGGCKSCAIDGMCEVCAEDNKKPNMAGSTCYVCPAQGCSHCSADNKCEACTNKDQRPSLDGTQCIVCDIERCMRCSAEGVCGECEEGYVPRDGMCVSSGTNRSGLSTGAVAGISVAVVVVVGGLVGFLCWWFVCRGKA

SEQ ID NO: 506 - protein, 373 aa, Giardia muris
PSCAGCKTCDSASGAEVCLSCTTAGNKVQPNGKSCATGCPANSSSNGDICECDSGYTPSQSENKCEKISCSTPSCEVCSNPGKDNEVCTQCATDNYLTPTNQCVGGCAVISGYYGNKTTNKCEKCHPDCVECVGSANNQCSACPAGRALKYTNDSDTAKGGTCGEACTVSTGNNGCETCGAQIGGTAYCSKCGNAQQAPLNGNCSANAHSRFCKTMGTGVCTECMDGFFIKDGGCYKTDRQPGKQVCSDATGGNGQCKKCASGIATSDGNCADKQCHSSCATCTTANDANACETCAAGYYKENGNTAGPCKSCSEGLAGCKQCTMSTTGNTFLCLEMGSTGGSTNKSSLSGGAIAGIVIAVIVVVGGLVGFLC

SEQ ID NO: 507 - protein, 235 aa, Giardia muris
PFARAATRFVLNTASKTCIPECTGAFAANLRNWAVHGRRRGSKYCSKCKAGYAPEDGICVSETTRSMPSGCTPNDGVCTACTGDYFLLSGGCYNTKTYPGISVCTAVASGKDGQCDTCANGQTPVNGVCPSCPEGCEKCTGSNDPKTCSACLPGYYKSGDNCVKCDSNSTSGSDTITGVSGCVSCALPSGSSAVTCYVTGSSTGGSTNKSSLSGGAIAGIVIAVIVVVGGLVGRA

SEQ ID NO: 508 - protein, 347 aa, Giardia muris
  misc_feature (129)..(129): Xaa can be any naturally occurring amino acid
  misc_feature (170)..(170): Xaa can be any naturally occurring amino acid
FNTGDKTCTNKCDATCKTCSAATDANRCLTCMPGYFPIDSTDQQGKKCVPCDSVDDKGREGCSVCSNTGGFKCTECKVNYKKQSNGDAGDDYTCVKICEDETACGGTSGACDAIVIDANGKELHYCSYXGEANTYPIDGKCNSAKANNQCDQGVCTQCTNNYFLYMGGCXKYDTVPGSLMCTEATTAGVCTTPNANNRYFLVPGASNTDQSVLACGNPLGTLVGTGNTAKAYVGVDGCSQCTAPTALTTVGMTPAVCTSCDNSKKPNRDGSGCVVCSDTNCKSCVMDGVCGECVDGYNLEGDKCVSSGANRSGLSTGAIAGISVAVIVVIGGLVGFLCWWFICRGKA

SEQ ID NO: 509 - protein, 235 aa, Giardia muris
GSVLSYGSDNTKGTCIAECTGKYLENCADGQCTASIAGSKYCSKCKSGFVPVNGLCVSAETARAAPPGCTPDKTNGVCTACTEKYFLESGGCYQAEKFPGNTLCTTADAGKCTTCANGQDKDSNGSCPACPTNCASCAKDNTKTCNKCFSGYYLDTAKACKKCSETSGNIQGVENCISCLAPTSPQSSTPVTCYVKTSGGGSGDNSTGGDSGPNLSSGAIAGISVAVIVVVGGLV

SEQ ID NO: 510 - protein, 255 aa, Giardia muris
GAGADKCTACPAGRALQYSGTDIAQGGSCVDECKVGTGQGGCETCGAQIGGTKYCSKCSTPEEVPVNGVCQANNVRASVCKTPNNAGGCTTCENGYFLKDGGCYETDRQPGKQVCKTADSNRKCTACANGQTADGSGVCPSCPEGCEKCASGTPQKCSACLLGYYLSTDKCVKCDTDSTSGSDTITGVSGCVSCKEPTTPPGTVTCYATSSSTGGSTNKSALSGGAIAGIVIAVIVVVGGLVGFLCWWFVCRGKA

SEQ ID NO: 511 - protein, 235 aa, Giardia muris
LPFARAVPGYSLLYSPDGLAGTCIPECTGAFAANCETGQCTAVVGGSKYCSKCNKGYVPVDGVCVSATKRAQPTGCTPGDGVCTACTGDYFLLSGGCYNTKTLPGKAVCTGVAASSNGKCDTCANGLKADSSGVCPSCPEGCEKCATSGNTQTCSACLPGYYLSNNNCVKCDVNDGQITGISGCVSCAPPSNSPGTVTCYLAKSGSTNKSSLSGGAIAGIVIAVIVVVGGLRRKG

SEQ ID NO: 512 - protein, 273 aa, Tetraodon nigroviridis
MSAGFFADGHVCAACHSSCATCFSRLGCQSCGSRQPLLGPDGSQCLASCPPGSYQADHTHCRRCHESCTECHGPGQRECASCSDPTALLRGGECVGECGTGFYSQAGVCYDCHPSCRSCVGPLASDCLQCLKPEEVVLPQSGQLQHGVCTAGCPAHKHLDDTQTCRAPRGCLSRVSPLLLALHRPVCRQLHVLSPAIQPERRPLPPRLPAGFFVQDGQCQACHPSCLTCSGPSQADCVSCPSLASLQDGYCRTSCPDGLFLHAASGECLGKCT

SEQ ID NO: 513 - protein, 230 aa, Giardia intestinalis
IDGASYCSECATATEYPQNGVCSSTTVRAAATCKAGSVAKGMCNSCTNGFLRMNGGCYETTKFPGKNVCEEAAPAGDTCQTPADGYKLNNGALITCSAGCKTCTSQDQCDTCKAGYAKTGGNTKKCVPCATGCSECNADDATKCTVCAAGYYLSKEKCIACDKSDGGSITGVANCANCAPPTNNKGPVLCYLIQNTNRSGLSTGAIAGISVAVVAVVGGLVGFLCWWFLC

SEQ ID NO: 514 - protein, 677 aa, Giardia intestinalis
LMAACQPDGDHAATCQTGKCETVGSAEICTECKTGGVPVDGFCRPFGSPQAAAAGCTKAGGAALDKMTATCEKCGDGYFLFMGGCYKTTDGPGSEICTKAEGGLCTECKTANGLFKNPAATPEKGSECILCSDINGADGYTGVANCAQCTKSDSNKGAATCTACQAGYYKDFQACSKCDGTCLTCETSAAQCTSCPEGKYLKGDKSCVNNNGCTGNTYADPESGKCLPCNTIDQACTQCEVDSTTKKPKCTNCGGQKMVKTAIDGTTTCVDANGCATSNVDGSHFLNDGSTKCILCSDDSESLEANKGTPGCKTCKKNGAKPTCSECLDGYYNSGNGGTVTCEACGANCATCTQAGNDKCTKCKPGFFMKGNGPTGECVACDNAQGGIDGCAECTKESTGPLKCTKCKPNRKPAGTSDNYTCTEKTCENPTACGGTAGSCDAIVIDDQGTTKHYCSYCGDSSQAPIDGLCASEAQKAGNTCANGVCTQCTNNYFLYMGGCYSTQKAPGSFMCKTAGNTGICTEAANNRYFVVPGASNTDQSVLACSNPLGTLTGTGDTAKAYVGVEGCSQCTAPAALSDGGMAPAVCTSCDSSKKPNRDGSGCVLCSVGGCKSCVMDNICGECNSGFSLDNGKCVSSGANRSGLSAGAIAGISVAVVAVVGGLVAFLCWWFVCRGKA

SEQ ID NO: 515 - protein, 419 aa, Giardia intestinalis; identical to SEQ ID NO: 473

SEQ ID NO: 516 - protein, 673 aa, Giardia intestinalis; identical to SEQ ID NO: 472

SEQ ID NO: 517 - protein, 547 aa, Giardia intestinalis; identical to SEQ ID NO: 471

SEQ ID NO: 518 - protein, 547 aa, Giardia intestinalis
MFYAFLLTGLALELVRAAQAGDECEEVASSEPNTCKACSAVVNGKKYCSQCNGGGSQSAPTDGVCSADNNECTRKQDGKCTQCANKSFMYKGGCYKDSQAPGNTMCETANAGVCTQAKEGYFLPPGTDNAHDSVVSCGDTTGVTLTGDKKYTGVAECVTCTQPGQLSIGGTKAAICTKCAADLYLKIDRGVMECVAESGCGEGFFPTIVDGVKKCAGCSEAGSGGIEDCELCIPRAPAPEAGVKVTCSKCHASKKVSPLKDECMDNCPAGTYDKQNVCTPCHSSCASCQTDDKETSCTACYPGHSLLYEANGATGRCVKECTGAFITNCADGQCTADVGGAKYCAQCKEGYAPIDGVCTAVKIGRDASVCTAASGKCTACTGAYALISGGCYGVAKLPGKAVCTAANNGECTTCANGQQPSGKVCPTCPAGCSKCTGSAPSQQCSECFPGYYKSGTKCVACDKDDGSIKGVPNCLSCKEPASSSGAVTCYLTQQKTDDGTGGDTGGDSMNKSGLSTGAIAGISVAAIVVVGGLVGFLCWWFICRGKA

SEQ ID NO: 519 - protein, 742 aa, Giardia intestinalis
MFCRFVLAGVILQFVWTAQIAEKAGTATCADQTTNCADEACNVLIDGKLYCSQCKADPADRAPVNGVCTDVSSDTAVCKTHAGGKCTGCNGNSFMYKGGCYERAKPPGNAMCQAADAGKCTEAVAGNKYFVPPADTDDAHDSVVSCGDATGVTLTGDKIYTGVAGCATCEKPEQLSASGTKAATCTACQEGKYLKTATDSATSCVTEEECTGTEGFFVKNGGTKTCEACDPGCKTCKTEAAKCTSCKDDKPYLKKDNGSDTGTCVTETECKNQSTHYADDTEPKTCKACAEGTSNGCATCEKGADGAVACKTCENQKKVQPNKKGCVESCPLNSNEEKTSGVCECVEGYVPEEAGTGCMKKSDPPAAPCNTPGCKTCSEPKTSKEVCTECEGTKALTPTGQCIDACGDLGGYYAGTNEGGKKACKKCEVENCLLCNGQGQCETCKDGYYKKETACAKCDTSCKTCANGNSNGCTSCEPKKALSYEGEGNTGTCKSECKPGTNNCEKCELTVDGTAYCSKCKEANQFPAEPESARRAAGKAITCTTQGTGVCDKCANGLLRMNGGCYETTKFPGKSVCEEAASAGDTCQVEAPGYHLNNNDLVTCSAGCKTCTSNTVCTECMDGYAKTDNKCTKCATGCATCAGSASNCDTCSTGYYKYKNACVSCTESNSDKTITGVANCANCAPPLNNKGSVLCYLVQSGENTNKSGLSAGAIAGIAVAVIIVVGGLVGFLCWWFMCRGKA

SEQ ID NO: 520 - protein, 547 aa, Giardia intestinalis
MFYAFLLTGLALELVRAAQAGDECEEVASSEPNTCKACSAVVNGKKYCSQCNGGGSQSAPTDGVCSADNNECTRKQDGKCTQCANKSFMYKGGCYKDSQAPGNTMCETANAGVCTQAKEGYFLPPGTDNAHDSVVSCGDTTGVTLTGDKKYTGVAECVTCTQPGQLSIGGTKAAICTKCAADLYLKIDRGVMECVAESGCGEGFFPTIVDGVKKCAGCSEAGSGGIEDCELCIPRAPAPEAGVKVTCSKCHASKKVSPLKDECMDNCPAGTYDKQNVFTPCHLSCASCQTDDKETSCTACYPGHSLLYEANGATGRCVKECTGAFITNCADGQCTADVGGAKYCAQCKEGYAPIDGVCTAVKIGRDASVCTAASGKCTACTGAYALISGGCYGVAKLPGKAVCTAANNGECTTCANGQQPSGKVCPTCPAGCSKCTGSAPSQQCSECFPGYYKSGTKCVDVDKDDGSIKGVPNCLSCKEPASSSGAVTCYLTQQKTDDGTGGDTGGDSMNKSGLSTGAIAGISVAVIVVVGGLVGFLCWWFICRGKA

SEQ ID NO: 521 - protein, 615 aa, Giardia intestinalis; identical to SEQ ID NO: 467

SEQ ID NO: 522 - protein, 721 aa, Giardia intestinalis
MLLGLLLFCTVARANCKAGNTPSANGQTCVPNADQCEDPLTTAGCATCTGTGSAQTCLTCSSSKKVRPDKKGCIASCPPSVTTENSGVCECTPGNKPSSDGTTCVPNADQCEDPLTTAGCATCTGTGSAQTCLTCSSSKKVRPDKKGCIASCPPSVTTENSGVCECTPGNKPSSDGTTCVPNADQCEDPLTTAGCATCTGTGSAQTCLTCSSSKKVRPDKKGCIASCPPSVTTENSGVCECTPGNKPSSDGTTCVPNADQCEDPLTTAGCATCTGTGSAQTCLTCSSSKKVRPDKKGCIASCPPSVTTENSGVCECTPGNKPSSDGTTCVPNADQCEDPLTTAGCATCTGTGSAQTCLTCSSSKKVRPDKKGCIASCPPSVTTENSGVCECTPGNKPSSDGTTCVSETACNTPNCKTCDNPKTDNEICTECNDGDYLTPTKQCTQSCGAIGSYYDGDKACEPCDPSCAGCTTKGPAKCTLCPPGKRLQYTNDDPNQGGSCVDECKAEVDGCAECGAVIGGTKYCSKCKEDKWAPQNGVCANSVTRNSFCTNAAGGVCTQCAADHFLQDGGCYKLGRQPGIQICTLADSNGGCQTCANSLQPNDGACPSCHSTCKTCSTADSSDKCTSCAAGYYMVGSGPNTCISCDSNSGSVKGVAGCMSCAPPPNNQGSVVCYLINDSGSTNKSSGLSTGAIAGISVAVVVVVGGLVGFLCWWFLCRGKA

SEQ ID NO: 523 - protein, 894 aa, Giardia intestinalis
MCPRFRWPLCSIEFRDMKQDPVRLLMQTRAVLCQLLASMLVGIGLIFAVALADACSPSIDGCAECDSTGKKCTKCDANGNTPYLKKTNPSDPTGTCVSAVDCQGSAGYYTDDSVSDAKECKKCNAPCTACAGTADKCTKCDANGAAPYLKKTNPSDPTGTCVSAVDCQGSAGYYTDDSVSDAKECKKCNAPCTACAGTADKCTKCDANGAAPYLKKTNPSDPTGTCVSAVDCQGSAGYYTDDSVSDAKECKKCNAPCTACAGTADKCTKCDANGAAPYLKKTNPSDPTGTCVSAVDCQGSAGYYTDDSVSDAKECKKCNAPCTACAGTADKCTKCDANGAAPYLKKTNPSDPTGTCVSAVDCQGSAGYYTDDSVSDAKECKKCNAPCTACAGTADKCTKCDANGAAPYLKKTNPSDPTGTCVSAVDCQGSAGYYTDDSVSDAKECKKCAEGQKPNTAGTQCFSCSDANCERCDQNDVCARCSTGAPPENGKCPAATPGCHSSCDGCTENAMTNQADKCTGCKEGRYLKPESAAGQSGACLTAEECTSDKTHFTREKAGDSKGMCLSCSDATHGITGCKKCALKTLSGEAESTVVCSECTDKRLTPSGNACLDNCPAGTYADNINGVSVCASCHATCAECNGDANAASCTACYPGYSLLYGSGTAGTCVKECTGAFITNCADGQCTANVGGAKYCAQCKDGYAPIDGICTTVAAAGRDASVCTAADGKCTKCAGEYTLMSGGCYGVAKLPGKSVCTLASNGKCTMCAANNQAPVQEKCPECSEGCAKCNDSNACTECLPGYYKGAGDKCFKCTASSGNNNQITGVANCVSCAPPAGGNGGPVTCYIKTDGDNTGGSVNKSGLSTGAIAGISVAVVVVVGGLVGFLCWWFICRGKA

SEQ ID NO: 524 - protein, 593 aa, Giardia intestinalis; identical to SEQ ID NO: 474

SEQ ID NO: 525 - protein, 520 aa, Giardia intestinalis
MLLPALCFLMSGLAAQRTKQPAPSCQVDNCEQCNADNVHCDQCAAGFDPNTDKTQCVRACQVDNCEQCNADNVHCDQCAAGFDPNTDKTQCVRACQVDNCEQCNADNVHCDQCAAGFDPNTDKTQCVRACQVDNCEQCNADNVHCDQCAAGFDPNTDKTQCVRACQVDNCEQCNADNVHCDQCAAGFDPNTDKTQCVRACQVDNCEQCNADNVHCDQCAAGFDPNTDKTQCVRACQVDNCEQCNADNVHCDQCAAGFDPNTDKTQCVRACQVDNCEQCNADNVHCDQCAAGFDPNTDKTQCVRACQVDNCEQCNADKIHCDQCAAGFDPNTDKTQCVRACQVDNCEQCNADNVHCDQCAAGFDPNTDKTQCVRACQVDNCEQCNADNVHCDQCAAGFDPNTDKTQCVRACQVDNCEQCNADNVHCDQCAAGFDPNTDKTQCVRACQVDNCEQCNADNVHCDQCAAGFDPNTDKTQCISSSINKSSGLSTGAIAGISVAVVVVVGGLVGFLCWWFLCRGKA

SEQ ID NO: 526 - protein, 633 aa, Giardia intestinalis
MFEKIIFGIAILQVVWAATTCTEASSDPQTGQCATGKCDVWIGGSNFCSQCSTAAEYLINGLCYPDNKDNGCEGQPSTGVCTQCAQGFFLHRGGCYKIGTEPGNLICEDTQASQTQGVCEACSSGYFKNPAADAAGTPPCIACNDTVGNSNNVGIANCKTCASPSAAGTENAPQTATCTACVDGFSPDSTGKACVAVQCAENCLTCTSSGEDKCKSCKDGYFLGAASGGEGKCIKCNDTTGANSYKGIANCAKCTQPQSAGPAVCTECAADLYLKIDRGVMECVAAAGCGEGFFPTTVGGVKKCIGCSEAGNGGIDKCAKCTLKTPAPEAGVKVTCSECDSEKKLSPLKDECMDSCPAGTYDKQNVCTPCHSSCASCTDATSTTCTACYPGFVLNAASGASAGTCIPECTGQYAENCADGQCTAIVGGSKYCSKCKAGYVPVDGVCVSTTTRAVTGCTPGDGVCTACTGSYFLQSGGCYQSTTYPGNTLCSSATNGKCQTCANGQTADNQGSCPACPDGCSKCTGSASPQQCQTCLPGYYKSGDSCVKCDASANGIVGVPNCISCAPPAGGSGSVTCYVKTDGTSGGDDNTGGSANRSGLSTGAIAGISVAVIVVVAGLVGFLCWWFICRGKA

SEQ ID NO: 527 - protein, 705 aa, Giardia intestinalis; identical to SEQ ID NO: 468

SEQ ID NO: 528 - protein, 539 aa, Giardia intestinalis
MGVAGCSECSHTGTSGPATCTECQAGFVTKDSACVKCGDGCSACSADTPTQCTACVEGKFLKDGNTCVEATECGADKYADKKTWTCKACDPDIAGCTACEYNDATGKPRCTNCGTNKTPRTTLDGTSTCVTKDYAGCQGADNGLFMTEDNVCRLCSDPAASDSEPKNKGIAGCKTCTKQQSQKPECIECLEGYIKEGNGPAATCEACGANCATCSEKADKTKCQTCKTGFFLKVSSTPGECFACDDTNNGGIEGCSQCTMEASTFKCTDCKVNYRKQSGTSPVTCTKVCEDDTACGGTSGACDAMIIDDQGTTKHYCSYCGDSSKYPIDGLCASEAQSNTCNNHVCESCTTGYFLYMGGCYSTQSPPGQHMCKTAANGVCTAVNENNKYFLVPGASNAQQSVLACSNPLGTLVDPQGTAKAYVGVHGCSQCTAPAALTTVGMAAAVCTACDSGKVPNKDGSGCVTCSVGDCKSCVVDDVCEECNSGFSLDSSGASCVSSGANRSGLSTGAIAGISVAVVAVVGGLVGFLCWWFVCRGKA

SEQ ID NO: 529 - protein, 390 aa, Giardia intestinalis
MTEDNVCRLCSDPAASDSEQKNKGIAGCKACTKTASANPACTECLEGYIENRSGGFTCDPCAPGCATCSKKEDPSKCLTCKQGYFLKDSSSGECISCSDTTKGGIEGCAECTNSGTFKCTKCKVNYRPSGEPSTGVTCTKACEDDTACGGTAGACDAIVIDNDGVEHHYCSYCGDSSKYPIDGLCASEAQSNTCNNHVCESCTTGYFMYMNGCYKVNTEPGSLMCKTSSKEGVCTEAANNRYFLVPGATNAQQSVLACSNPLGTSTGTDSAAKAYVGIDGCSACTAPAGLSDGGMTPAVCTSCDSDKKPNKDGSGCVVCSDTNCKSCVMDGVCGECNSGFSLDNGKCVSSGANRSGLSTGAIAGISVAVVAVVGGLVGFLCWWFVCRGKA

SEQ ID NO: 530 - protein, 694 aa, Giardia intestinalis
INMFDKLIFASLALQLTWATQVKRMVRSATCDSTTSGSTKCAAEKCNVWIGGKDYCSQCSTDAELLIDGGCAPTTSDLAKKCISDNKGKCSSCGDGYFLHKGGCYKFGTAPGNAVCTEPSAPGDSLPAGVCTTCGSGYFKNPAESAASTPPCIACNDTAGNSGNTGLVGCGTCDPPVSGQATCTSCLDGFFGIGEGTVTCTECTGECKTCKGGADQCTSCKTSSKYLKITDSVAETGECIDQGQCTETHFAMVDGGINMCYLCNTTDKGGKVGCRTCTKSGTVTCKTCLDGFFGTTDCVACHEDCLTCKIEAAKCTSCKADTKPYFKEGADNDQTGTCVDEVECKGDHFSTIDTSNSDKKICVPCSKTDKGGITNCKTCAFKVSSTEERPAITCTECTTNNLSPLKDECMAACPAGTYANNKVCASCHSSCAGCQTDDRETSCTACYPGYSLLYEPNGATGRCVKECTGAFITNCADGQCTADVGGAKYCAQCKDGYAPIDGICTTMAAAGRDASVCTAAGGKCTACTGDYALVSGGCYGIQKLPGKAICIAANNGECTTCANGQQPSGKVCPTCPAGCSKCTGSAPSQQCSECFPGYYKSGDKCVKCDKDSENIKGVPNCVSCKEPANSSGAVTCYLTQQKTDDGTGGDTGGDSMNKSGLSTGAIAGISVAVIVVVGGLVGFLCWWFICRGKA

SEQ ID NO: 531 - protein, 445 aa, Giardia intestinalis; identical to SEQ ID NO: 470

SEQ ID NO: 532 - protein, 642 aa, Giardia intestinalis
RAGCYEAAQQPGQTMCQAADAGVCTQAAQGYFVPPGADASHQSVIPCGDEEEITVKNDKKYKGVLHCTRCNAPTEAADANAKAATCTACQADRYLKTAKDQATSCVTEQECTGTEGFFAKNGGTKTCEACAETCKTCKTEAAKCTSCKDDKPYLKKDNGSDTGTCVTEAECKTGNTHYPDDTELKTCKTCAEGTSDGCATCEKGADGAVACKTCGNQKKVQPNKKGCVENCPSNSNDKKTPGTCECVEGYVPEEAGTGCTKKPDPPAAPCNTPGCKTCSEPKTSKEVCTECEDPKALTPTGQCIYGCEHLEGYYEGTSEGGKKACKKCEVENCLLCNGNGQCETCKDGYYKKETACAKCDTSCKTCANGEPNGCTSCEAKKALSYEGEGNTGTCKSECKPGTNNCEKCELTVDGTAYCSKCKDANQFPQNGVCSAAAGKAITCTTKGTGVCDKCANGLLRMNGGCYETTKFPGKSVCEEAASAGDTCQVEAPGYHLNNNDLVTCSAGCKTCTSNTVCTECMDGYAKTDNKRTKCATGCATCAGSASNCDTCSTGYYKYKNACVSCTESNSDKTITGVANCAYCAPPLNNKGSVLCYLVQSGENTNKSGLSAGAIAGIAVAVIIVVGGLVGFLCWWFMWRGKA

SEQ ID NO: 533 - protein, 150 aa, Giardia intestinalis
PKCDTSCKTCANGEPNGCTSCEAKKALSYEGESNTGTCKSECKPGTNNCEKCELTVDGTAYCSKCKDANQFPQNGVCSAAAGKAITCTTKGTGVCDKCANGLLRMNGGCYETTKFPGKSVCEEAASAGDTCQVEAPGYHLNNNDLVTCSA

SEQ ID NO: 534 - protein, 667 aa, Giardia intestinalis
MFGSFVLAGVLVQIAWAGKATERAAQCADNTNCAEEACNVLIGGKLYCSRCNTGFVPINGQCADKEGATDQCKDGSGGDTADQTCGQCAEQTFMYKGGCYEAAQQPGQTMCQAADAGVCTQAAQGYFVPPGADASHQSVIPCGDEEGITVKNDKKYKGVLHCTRCYAPTEAADANAKAATCTACGDSKIVKTAKDSATSCVTEEECTGTKTCKTCAEGTSDGCATCEKGADGAVACKTCGSNKKVQPNKKGCIAKCPETVSAEKDGVCECVEGYVPDNAGTGCTKKPDPQCNTPGCKTCSEPKTSKEVCTECEDPKALTPTGQCIYGCEHLEGYYEGTSEGGKKACKKCEVENCLLCNGQGQCETCKDGYYKSGAACAKCNTSCKTCANGNSNGCTSCEPKQVLSYEGEGTGTCKPGCKPVSGGKDGTCKSCDLNIDGTSYCSACNVGTEYPENGVCVKKSARTASCQAEPSNGVCGTCARGFFRMNGGCYETTKLPGKSVCEEVASAGDTCQTPADGYKLNNGALITCSAGCKTCTSQDQCDTCKAGYAKTGGNTKKCVPCATGCSECNADDATKCTVCAAGYYLSKEKCIACDKSDGGSITGVANCANCAPPTNNKGPVLCYLIQNTNRSGLSTGAIAGISVAVIAVVGGLVGFLCWWFICRGKA

SEQ ID NO: 535 - protein, 174 aa, Giardia intestinalis
DNTRAAACTTKDGKGGCSVCASGYFLLDGGCYQTSRQPGSQVCTTADSNGQCSQCANTLSPNDGVCPACPAGCSKCSGSSTCTECLAGYYLDSANACKKCSETSGDIQGVENCISCLAPTSPSTPTPVTCYVTQTPTVDPADPSVNKTGLSSGAIAGISVAVIAVVGGLVGFLC

SEQ ID NO: 536 - protein, 163 aa, Giardia intestinalis
SDGKCTACTGNYALLSGGCYNTKALPGKAVCTAASGGSCTTCANGQAYTNNNCPACAEGCSACTNGNTQQCTKCLAGYYLSNSKCFKCTADSNEGSNAITGVPNCVSCAPPTTSGTVTCYATQTPTVDPTDPSVNKGGLSTGAIAGISVAVIAVVGGLVGFLC

SEQ ID NO: 537 - protein, 157 aa, Giardia intestinalis
CTGKYFLESGGCYQAEKFPGNTLCTTTDSNGKCTGCANGQTADSGTGSCPACPTNCASCTGTSSKTCTKCFSGYYLDSANACKKCSETSGTITGVENCISCEKPSNGNGAVTCYVKTSGGGSSDNSTGGGPNLSSGAIAGISVAVIVVVGGLVGFLC

SEQ ID NO: 538 - protein, 161 aa, Giardia intestinalis
SGGVCTACTGDYALLSGGCYNTQALPGMAVCTAITGNNGQCTACANGQQPASGVCPACAEGCAKCQSSTSTCTACLAGYYLSGTKCVKCDKDDSNIKGVPNCVSCAAPASNTGTVTCYVTQTPTVDPTDPSVNKGGLSSGAIAGISVAVIAVVGGLVGFLC

SEQ ID NO: 539 - protein, 158 aa, Giardia intestinalis
ETAQTGGTCSTPAEGYKLDGSNNLVICPSNCKVCANKDSCSECARGYVKLSNAQTCTECAAGCATCAGTAATCDICTDGYYKSGSKCIACSKSEASIIGVSDRASCAPPASGTGSVLCYFMNSDVIDPDNKSSLSTGVIAGISVAAVAIVGGLAGFLC

SEQ ID NO: 540 - protein, 166 aa, Giardia intestinalis
SGGVCTVCTGANYALLSGGCYNTKVLPGMAVCTAITGNNGQCTACANGQQPASGVCPACAANCASCTGTDTKTCTKCLSGYYLDSGSVCRKCSEISGDILGVENCISCAPPTGNRGFVTCYVKTSGGSGGGDSTGGNNGSNFSTGMIVSISLTAVAVVGGLIGFLC

SEQ ID NO: 541 - protein, 130 aa, Giardia intestinalis
ANNGQCQTCANGQQPASGVCPACPANCASCTGTDTKTCTKCLSGYYLDSGSVCRKCSEISGDILGVENCISCAPPTGNRGFVTCYVKTSGGSGGGDSTGGNNGSNFSTGMIVSISLTAVAVVGGLIGFLC

SEQ ID NO: 542 - protein, 165 aa, Giardia intestinalis
SGGVCTVCTGANYALLSGGCYNTKVLPGMAVCTQAGSNGECKTCANGQTYANNNCPACAEGCSACNAGQTQQCTKCLAGYYLPNSKCFKCTADSNEGSNAITGVPNCVSCAPPTTSGTVTCYATQSPSVNPTDPSVNKTGLSSGAIVGISIAVIAVVGGLVGFLC

SEQ ID NO: 543 - protein, 120 aa, Giardia intestinalis
ITASNNGQCQTCANGQNPTNGNCPACAEGCAKCQRSTSTCTECLAGYYKTFASKCVKCSETSGNIQGVKNCISCEKPSSGNGAVTCYVKTDKGPNLSIGAIAGISVAVIVVVGGLVGFLC

SEQ ID NO: 544 - protein, 171 aa, Giardia intestinalis
STARANECKTPANKGGCSVCASGYFLLDNGCYKTDRQPGSQVCKTEGSGKCTKCANEQTPDQQGSCPACPAGCSKCSDANTCTECLAGYYLSGTKCVKCDKDDNAITGVPNCVSCAPPTTPPGPVTCYVTQEPSVNPTDPSVNKGGLSSGAIAGISVAVIAVVGGLVGFLC

SEQ ID NO: 545 - protein, 169 aa, Giardia intestinalis
DCEANTHFSTETPESGKKCFACGDTTNGVIGCEKCTAPGDGKTNPTCTKCTDKYLKTAADGTTTCVAKGACKDDYFTVDDSTNGHKCVSCGDETGVTDANSAQWKGVANCAKCTQPSAAGTVKCSECASGYKLEGEACVPASTNLSSGAIAGISVAVIAVVGGLVGFLC

SEQ ID NO: 546 - protein, 128 aa, Giardia intestinalis
ANNGQCQTCANGQTYASGNCPTCAEGCAKCQSSTSTCTECLAGYYLSNSKCVKCSENSADGNIKGVPNCVSCKEPSGGPGPVTCYVTQTPIVDPTDPSVNKGGLSSGAIAGISVAVIAVIGGLVGFLC

SEQ ID NO: 547 - protein, 127 aa, Giardia intestinalis
ANNGQCQTCANGQTYASGNCPTCAEGCAKCQSSTSTCTECLAGYCLSNSKCVKCSENSADGNIKGVPNCVSCVAPTTSGPVTCYVTQEPSVNPTDPSTNKGGLPSGAIAGISVAVIVVVGGLVGFLC

SEQ ID NO: 548 - protein, 173 aa, Giardia intestinalis
STARANECKTPDNKGGCSMCASGYFLLDNGCYKTDRQPGSQVCKTEGSGKCTKCANEQTPDQQGSCPACPAGCSKCSDANTCTECLAGYYLSGTTCVKCDKNSTDNKITGVENCVSCNPPSSNQGSVTCYVTQEPSVNPTDPSTNKTGLSSGAIAGISVAVIAVVGGLVGFLC

SEQ ID NO: 549 - protein, 128 aa, Giardia intestinalis
ANNGQCQTCANGQTYASGNCPTCAEGCAKCQSSTSTCTECLAGYYLSNSKCVKCSENSADGNIKGVPNCVSCAPPTGNSGPVTCYVTQEPSVNPTDPSTNKTGLSSGAIAGISVAVIAVVGGLVGFLC

SEQ ID NO: 550 - protein, 132 aa, Giardia intestinalis
PGDGKTNPTCTKCTDKYLKTAADGTTTCVAKGACKDDYFTVDDSTNGHKCVSCGDETGVTDANSAQWKGVANCAKCTQPSAAGTVKCSECASGYKLEGEACVPASTNLSSGAIAGISVAVIAVVGGLVGFLC

SEQ ID NO: 551 - protein, 127 aa, Giardia intestinalis
AANNGQCQTCANGQNATSGNCPACAEGCAECVSSISTCTECLAGYYLSGTKCVKCDKDDNAITGVPNCVSCAPPTTPPGPVTCYVTQTPTVDPADPSVNKGGLPSGAIAGISVAVIAVVGGLVGFLC

SEQ ID NO: 552 - protein, 129 aa, Giardia intestinalis
VTGNNGQCTTCANGQNANSGVCPVCPAGCSKCSGSNTCTECLAGYYLSGTTCVKCDKNSTDNKITGVENCVSCNPPSSNQGSVTCYVTQEPSVNPTDPSTNKTGLSSGAIAGISVAVIVVVGGLVEFLC

SEQ ID NO: 553 - protein, 165 aa, Giardia intestinalis
SGGVCTVCTGANYALLSGGCYNTKVLPGMAVCTQAGSNGECKTCANGQTYANNNCPACAEGCSACNAGQTQQCTKCLAGYYLSNSKCFKCTADSNEGSNAITGVPNCVSCAPPTTSGTVTCYATQSPSVNPTDPSVNKTGLSSGAIVGISIAVIAVVGGLVGFLC

SEQ ID NO: 554 - protein, 126 aa, Giardia intestinalis
ANSGSCTTCANGQTYASGNCPACAEGCAKCQSSTSTCTECLAGYYLSSSKCVKCTENSNGITGVPNCVSCAAPTSNSGPVTCYVTQTPTVDPADPSVNKTGLSSGAIAGISVAVIAVVGGLVGFLC

SEQ ID NO: 555 - protein, 137 aa, Giardia intestinalis
PAQGKTKPACTKCTSSNYLKTVDGTTTCVEKTACKDDFFPVDDSTNGHKCVSCGDETGVTDASNAKWNGVANCTKCTQPSAAGTAKCEECASGYILDSQANTCASASTNKSALSTGAIAGISVAAVVVVGGLAGFLC

SEQ ID NO: 556 - protein, 157 aa, Giardia intestinalis
CAGKYFLESGGCYQAEKFPGNTLCTTTDSNGKCTGCANGQTADSGTGSCPACPTNCASCTGTSSKTCTKCFSGYYLDSANACKKCSETSGTITGVENCISCEKPSNGNGAVTCYVKTSGGGSSDNSTGGGPNLSSGAIAGISVAVIVVVGGLVGFLC

SEQ ID NO: 557 - protein, 170 aa, Giardia intestinalis
VGGAGRAASACTPGDGVCTACTGNYYLLSGGCYQTTKLPGSSVCTEVKAGQNGQCQTCANGQSANGQGVCPSCPDNCATCSTTSTCSACFSGYYLTADTCTKCTENNGEVTGVTSCLSCAAPSSGKGSVICYVKTGSNSTGSGTNLSSGAIAGISVAVIVVVGGLVGFLC

SEQ ID NO: 558 - protein, 158 aa, Giardia intestinalis
ACTGKYFLESGGCYQAEKFPGNTLCTTTDSNGKCTGCANGQTADSGTGSCPACPTNCASCTGTSSKTCTKCFSGYYLDSANACKKCSETSGTITGVENCISCEKPSNGNGAVTCYVKTSGGGSSDNSTGGGPNLSSGAIAGISVAVIVVVGGLVGFLC

SEQ ID NO: 559 - protein, 126 aa, Giardia intestinalis
ATSGSCTTCANGQTYTSGTCPACAEGCAKCQSSTSTCTECLAGYYLSSSKCVKCTENSNGITGVPNCVSCAAPTSNSGPVTCYVTQTPTVDPADPSVNKSGLSSGAIAGISVAVIAVVGGLVGFLC

SEQ ID NO: 560 - protein, 163 aa, Giardia intestinalis
SDGKCTACTGNYALLSSGCYNTKALPGSAVCTTATSGSCTTCANGQQYTNNNCPACAEGCSACSNGNTQQCTKCFAGYYLSNSKCLKCTADSNEGSNAITGVPNCVSCAPPTTSGTVTCYVTQTPAVDPTDPSVNKTGLSSGAIAGIPVVVIAVVGGLVGFLC

SEQ ID NO: 561 - protein, 157 aa, Giardia intestinalis
CTEKYFLESGGCYQAEKFPGNTLCTTADAGKCTTCANGQDKDSNGSCPACPTNCASCAKDNTKTCNKCFSGYYLDTAKACKKCSETSGNIQGVENCISCAPPTGNRGFVTCYVKTSGGSGGGDSTGGNNGSNFSTGMIVSISLTAVAVVGGLIGFLC

SEQ ID NO: 562 - protein, 127 aa, Giardia intestinalis
VTGGNGQCSACANGQTYASGNCPACAEGCAKCATDTNQCDTCYSGHYKSGTKCVKCSENSNSITGVPNCVSCAPPSGSGTVTCYVTQEPSVNPTDPSVNKTGLSSGAIAGISIAVIVVVGGLVGFLC

SEQ ID NO: 563 - protein, 126 aa, Giardia intestinalis
ANSGSCTTCANGQTYASGNCPACAEGCAKCQSSTSTCTECLAGYYLSSSKCVKCTENSNGITGVPNCVSCAAPTSNSGPVTCYVTQTPTVDPADPSVNKSGLSSGAIAGISVAVIAVVGGLVGFLC

SEQ ID NO: 564 - protein, 259 aa, Giardia intestinalis
ACSPECAECVGPANNQCSSCPAGKKLTYTDDSNPNNGGTCGDACKVSADGTGCETCGAQIGGTAYCSKCKTSTQAPLNGDCAASSRATFCTKMGNGVCLQCEDNYFLKDGGCYQTDRQPGKQVCSNAQGGNGKCQTCANGLAATDGNCAECHPTCATCSVPSTASSCKTCATGYYKENGDDTTDGPCMKCSEKISGCKQCVSSSGSSVICLESEVGTGGSTNKSGLSTGAIAGISVAVIVVVGGLVGFLCWWFLCRGKA

SEQ ID NO: 565 - protein, 435 aa, Giardia intestinalis
ADTQVGKCKENMCEMAGSTEICTECKDQGNVPIDGICKPQNDNAVTTAGCKKKAGDNVDASSVRCEQCDAANHFLYKGGCYSKDATPGNQMCKTVTTNGICAEAATTKNYFVVPGATKTDQSVVWCGDVEGVTLGDGKNYTGVDGCTTCEKPEQATDAPKAATCNACGGGKIVKTVDGVTSCVEEADCNNGYFVDSRNGKKCSKCASSCKTCENTETQCTSCTEATPYLKKEDDSETGTCVNQGDCPATHYIDEAAKTCTTCTSGGAKDCKTCEKNGDGAVCKECPDSDKTIFGLNKKSCVASCPANSTPKATGQDSQVCECNEGLQPNTESTECRPISNCNTEHCLECTGEGADKEVCTKCLSEYYLTPTSQCVSDCTTLKGYYGDDSGKKTCKKCNDACVECKGEGADKCTACPAGKMLQYTDADTPANGARA

SEQ ID NO: 566 - protein, 342 aa, Giardia intestinalis
GTAKAYVGVDGCSQCTAPTALTTAGMTVAVCTACDSGKKPNKGGSGCVTCSVGDCKSCVVDNICGECVDGFYFKAGDAPSCVSAEACTNEEGFFIDATEKKCTACADDNCAVCVAKEQQKCSLCKTSGTKKYLKKDGESTTGTCVDTAGCPATHYVDEEAKECNTCVSAGTTDCTTCEKDANGVVCKTCTTDTKTIFGLNRKSCVASCPANSTPKATGQDSQVCECNEGLQPNTESTECQPISNCNTEHCLECTSEGADKEVCTKCLSEYYLTPTSQCVSDCTTLKGYYGNDTDRKCKKCNDACVECKGEGADKCTACPAGRMLQYTDADTPANGGRCMNQC

SEQ ID NO: 567 - protein, 495 aa, Giardia intestinalis
  misc_feature (46)..(46): Xaa can be any naturally occurring amino acid
AGSLKCTKCKPNRKPVGTSDNYTCTEKTCEDETACGGTSGACNAIXIDTDGNTKHYCSYCGDSSQAPIDGLCATDKKGNTACTSHTCPSCAANYFLYMNGCYSVSAQPGNYMCKKADNNGICTEAANNKYFIVPGASNQNQSVLACGNPLGTLVDTKAYVGVEGCSQCTAPVALTTVGMTVAVCTACDSGKKPNKGGSGCVTCSVGDCKSCVVDNICGECVDGFYFKAGDAPSCVSAEACTNEEGFFIDATEKKCTACADDNCAVCVAKEQQKCSLCKTSGTKKYLKKDGESTTGTCVDTAGCPATHYVDEEAKECNTCVSAGTTDCTTCEKGANGVVCKTCTTDTKTIFGLNRKSCVASCPANSTPKATGQDSQVCECNEGLQPNTESTECQPISNCNTEHCLECTSEGADKEVCTKCLCEYYLTPTSQCVSDCTTLKGYYGNDTDRKCKKCNDACVECKGEGADKCTACPAGRMLQYTDADTPANGGTCMNQC

SEQ ID NO: 568 - protein, 545 aa, Giardia intestinalis
  misc_feature (75)..(75): Xaa can be any naturally occurring amino acid
  misc_feature (129)..(129): Xaa can be any naturally occurring amino acid
  misc_feature (442)..(442): Xaa can be any naturally occurring amino acid
  misc_feature (451)..(451): Xaa can be any naturally occurring amino acid
ACVNSNESTGNTYADPESGTCRDCNTIDQACTQCEVDSTTKKPKCTACDSSKIPRTTLDGTSTCVAKNYAGCQGXDNGLFMTEDNVCRLCSDPAASDPEQKNKGIAGCKACMKTASANPTCTECLEGYXSTGVGSVTCTPCHAHCATCSAETAEDKCLTCKAGFFLVEVAKPAGKCISCSDTNNGGIDGCAECTKEASTFKCTGCKANYKQSGTSPVTCTKTCEDDTACGGTSGACDAMIIDDQGTTKHYCSYCGETNKIPIDGKCVDSGQKNGNTCDNHICTSCTTGYFLYMGGCYSVSTQPGKSMCKTAANGVCTAVNENNKYFLVPGASNAQQSVLACSNPLGTLVDPQGTAKAYVGVHGCSQCTAPAALTTVGMAAAVCTACDSGKKPNKGGSGCVTCSVGDCKSCVVDNICGECVDGFYFKAGDAPSCVSAEACTNXEGFFIDATXKKCTACADDNCAVCVAKEQQKCSLCKTSGTKKYLKKDGESTTGTCVDTAGCPATHYVDEEAKECNTCVSAGTTDCTTCEKGANGVVCKTCTTDT

SEQ ID NO: 569 - protein, 548 aa, Giardia intestinalis
FQLIPLFVVSALAVTCQADKCETVGNTEICTQCRARGVPVDGFCWPPGFPQAAAAGCTEEDGVPLDKTAATCGKCGDGYLLFMGGCYKTESQPGSDICTAASNGVCTECNTKNGLFKNPATAPEKGRECILCHDATGADGYMGVEGCATCTAPTNNKGAATCTECQDGYYNDGGACKKCVDGCIDCTGANQCTTCEDGKYLKNNQCVDAGQCDQGTYADPTTGQCKPCGITDCATCEYNATISQPQCKTCSTSSNKMVKTAADGTTTCVDDGGCTNGNTHFVEGTNQKLCVPCGDTTNGGVLGCNTCSSKTTCTKCLDGYYDSGSGTVTCTACPGANCATLCERYKRQCTTCKPGFFLKDSSSGECISCSDKNNGGHEGCSACSSNGAFKCTDCKPNYKKEGTSDNYTCVKTCEDETACGGTSGACDAIVIDENGNTKHYCSFCGESGKFPIDGLCASDKANNNGCANGVCTSCTAANYFLYMGGCYKVNTVPGSHMCKTANNGVCTAVSENNKYFIVPGASNQNQSVLACGNPLGTELTAKAYVGVK

SEQ ID NO: 570 - protein, 1154 aa, Giardia intestinalis
  misc_feature (686)..(686): Xaa can be any naturally occurring amino acid
MLVGFLLICATVLAKDSGKDTCFPGYTINTDTKQCTKDPEAPCNVEGCETCVEGNAQQCKTCRPGYTLNTDTKQCTKDPEAPCNVEGCETCVEGNAQQCKTCRPGYTLNTDTKQCTKDPEAPCNVEGCETCVEGNAQQCKTCRPGYTINTDTKQCTKDPEAPCNVEGCETCVEGNAQQCKTCRPGYTINTDTKQCTKDPEAPCNVEGCETCVEGNAQQCKTCRPGYTINTDTKQCTKDPEAPCNVEGCETCVEGNAQQCKTCRPGYTINTDTKQCTKDPEAPCNVEGCETCVEGNAQQCKTCRPGYTINTDTKQCTKDPEAPCNVEGCETCVEGNAQQCKTCRPGYTINTDTKQCTKDPEAPCNVEGCETCVEGNAQQCKTCRPGYTINTDTKQCTKDPEAPCNVEGCETCVEGNAQQCKTCRPGYTINTDTKQCTKDPEAPCNVEGCETCVEGNAQQCKTCRPGYTINTDTKQCTKDPEAPCNVEGCETCVEGNAQQCKTCRPGYTINTDTKQCTKDPEAPCNVEGCETCVEGNAQQCKTCRPGYTINTDTKQCTKDPEAPCNVEGCETCVEGNAQQCKTCRPGYTINTDTKQCTKDPEAPCNVEGCETCVEGNAQQCKTCRPGYTINTDTKQCTKDPEAPCNVEGCETCVEGNAQQCKTCRPGYTINTDTKQCTKDPEAPCNVXGCETCVEGNAQQCKTCRPGYTINTDTKQCTKDPEAPCNVQGCETCVEGNAQQCKTCRPGYTINTDTKQCTKDPEAPCNVQGCETCVEGNAQQCKTCRPGYTINTDTKQCTKDPEAPCNVEGCETCVEGNAQQCKTCRPGYTINTDTKQCTKDPEAPCNTPNCKTCDNPKTDSEICTECNDGNYLTPTNQCVPDCTTISGYYGDTDKKCKACNPECAECVGPANNQCSSCPAGKKLTYTDDSNPNNGGTCGDACKVSADGTGCETCGAQIGGTAYCSKCKTSTQAPLNGDCAASSRATFCTKMGNGVCTQCEDNYFLKDGGCYQTDRQPGKQVCSSAQGGNGKCQTCANGLAATDGNCAECHPTCATCSTAGAADKCKTCATGYYKENGDDTTDGPCKKCSEKISGCKQCVSSSGSSVICLESEVGTGGSVNKSGLSTGAIAGIAVAVIVVVGGLVGFLCWWFLCRGKA

SEQ ID NO: 571 - protein, 394 aa, Giardia intestinalis
MLVGFLLVCATVLAKDSGKDTCFPGYTINTDTKQCTKDPEAPCNVEGCETCVEGNAQQCKTCRPGYTINTDTKQCTKDPEAPCNTPNCKTCDNPKTDSEICTECNDGNYLTPTNQCVPDCTTISGYYGDTDKKCKACNPECAECVGPANNQCSSCPAGKKLTYTDDSNPNNGGTCGDACKVSADGTGCETCGAQIGGTAYCSKCKTSTQAPLNGDCAASSRATFCTKMGNGVCTQCEDNYFLKDGGCYQTDRQPGKQVCSSAQGGNGKCQACANGLAATDGNCAECHPTCATCSTAGAADKCKTCATGYYKENGDDTTDGPCKKCSEKISGCKQCVSSSGSSVICLESEVGTGGSVNKSGLSTGAIAGIAVAVIVVVGGLVGFLCWWFLCRGKA

SEQ ID NO: 572 - protein, 739 aa, Giardia intestinalis; identical to SEQ ID NO: 475

SEQ ID NO: 573 - protein, 280 aa, Giardia intestinalis
  misc_feature (201)..(201): Xaa can be any naturally occurring amino acid
  misc_feature (277)..(277): Xaa can be any naturally occurring amino acid
NPQQCKTCGSGYTLNPTTKKCDRNSAPCEVEGCDVCEESNPQQCKTCGSGYTLNPTTKKCDRNSAPCDTPNCKACDNPKTDNEICTECNDNNYLTPTSQCVSDCTTLKGYYGDDSGKKTCKRCNDACAECKGEGADKCTACPAGKMLQYTDADTPANGGTCMNQCSVSPANDGCAECGAQIGGTAYCSKCKNTLQAPKDGXCAANTRTRFCTTVSNGACTQCENNYFLKDGGCYQTNRQPGKQVCTQANGGKCQTCANGLAATDGNCAECHPTCATXSTA

SEQ ID NO: 574 - protein, 1274 aa, Giardia intestinalis
MLVGFLLVCATVLAKDSGKDTCFPGYTLNTDTKQCTKDPEAPCNVEGCETCVEGNAQQCKTCRPGYTINTDTKQCTKDPEAPCNVEGCETCVEGNAQQCKTCRPGYTINTDTKQCTKDPEAPCNVEGCETCVEGNAQQCKTCRPGYTINTDTKQCTKDPEAPCNVEGCETCVEGNAQQCKTCRPGYTINTDTKQCTKDPEAPCNVEGCETCVEGNAQQCKTCRPGYTINTDTKQCTKDPEAPCNVEGCETCVEGNAQQCKTCRPGYTINTDTKQCTKDPEAPCNVEGCETCVEGNAQQCKTCRPGYTINTDTKQCTKDPEAPCNVEGCETCVEGNAQQCKTCRPGYTINTDTKQCTKDPEAPCNVEGCETCVEGNAQQCKTCRPGYTINTDTKQCTKDPEAPCNVEGCETCVEGNAQQCKTCRPGYTINTDTKQCTKDPEAPCNVEGCETCVEGNAQQCKTCRPGYTINTDTKQCTKDPEAPCNVEGCETCVEGNAQQCKTCRPGYTINTDTKQCTKDPEAPCNVEGCETCVEGNAQQCKTCRPGYTINTDTKQCTKDPEAPCNVEGCETCVEGNAQQCKTCRPGYTINTDTKQCTKDPEAPCNVEGCETCVEGNAQQCKTCRPGYTLNTDTKQCTKDPEAPCNVEGCETCVEGNAQQCKTCRPGYTINTDTKQCTKDPEAPCNVEGCETCVEGNAQQCKTCRPGYTINTDTKQCTKDPEAPCNVEGCETCVEGNAQQCKTCRPGYTINTDTKQCTKDPEAPCNVEGCETCVEGNAQQCKTCRPGYTINTDTKQCTKDPEAPCNVEGCETCVEGNAQQCKTCRPGYTINTDTKQCTKDPEAPCNVEGCETCVEGNAQQCKTCRPGYTINTDTKQCTKDPEAPCNVEGCETCVEGNAQQCKTCRPGYTINTDTKQCTKDPEAPCNVEGCETCVEGNAQQCKTCRPGYTINTDTKQCTKDPEAPCNTPNCKTCDNPKTDNEICTKCNDGDYLTPTNQCVPDCTAISGYYGDTDKKCKACNPECAECVGPANNQCTACPVGKMLQYTDTNTPVNGGTCMDQCSVSSTNDGCAECGAQIGGTAYCSKCKNTQQAPLNGNCAASSRVAFCATITSGACTKCNEGYFLKDGGCYQTDRQPGKQVCSNAQGGNGKCQTCANGLAASDGNCAECHSTCATCSTADAADKCKTCATGYNKENGDDTTAGLCKKCSEKISGCKQCVSSSGSSVICLESEVGTGGSVNKSGLSTGAIAGISVAVIVIVGGLVGFLCWWFLCRGKA

SEQ ID NO: 575 - protein, 556 aa, Giardia intestinalis
  misc_feature (121)..(121): Xaa can be any naturally occurring amino acid
  misc_feature (124)..(124): Xaa can be any naturally occurring amino acid
  misc_feature (126)..(126): Xaa can be any naturally occurring amino acid
  misc_feature (128)..(129): Xaa can be any naturally occurring amino acid
CTACGDSKIVKTAKDQATSCVTEKECTDAPGFFVDTTSGKKCSKCAETCKTCKTEAAKCTSCKDDKPYLKKDDESTTGTCVDANGCPATHYVDKEAKECNTCVSGGTVDCTTCETSANGVXCKXCXIXXKTKFALGKNSCVENCPSNSSDEKTLGTCECVEGYVPDDAGTGCTKKSDPQCNTPGCKTCSDPKKDKEVCTECEDPKALTPTGQCIDNCGDLGGYYEGTNEGGKKACKKCEVENCFLCNGQGQCETCKDGYYKSGAACAKCDTSCKTCANGKPNGCTSCEPKQVLSYEGEGTGTYKPECKPVSGGKDGTCKSCDLSIDGTSYCSACNVGTEYPENGVCVKKSARTASCQVEPSNGVCGTCAKGFFRMNGGCYETTKLPGKNVCEEAAPTGDTCQTPADGYKLNNGALITCSAGCKTCTSQDQCDTCKAGYAKTGGNTKKCVPCATGCSECNADDATKCTVCAAGYYLSKEKCIACDKSDGGSITGVANCANCAPPTNNKGPVLCYLIQNTNRSGLSTGAIAGISVAVIAVVGGLVGFLCWWFICRGKA

SEQ ID NO: 576 - protein, 435 aa, Giardia intestinalis
SSGCVDENHFKADDDSACYLCGDISGNNENTNKGVADCNKCTKEAGTKTTCSECLSGRFLETNTCTKKCADTCAKCTAETDINKCTECMPGYFLKTEGVTKECVPCSDTAKGGIDGCSVCSNDGNTSKCTDCKPNYRKQSDSSPGSVTCTKTCEDPTACGGTSGACDAMIIDDKGNAKHYCSYCGETNKFPIDGICNSDAQSNTCNNHVCTSCTTGYFLYMGGCYSVSAQPGNYMCKTADSSGICTEAANNRYFLVPGASNTDQSVLACSNPLGTLTGTGDTAKAYVGVDGCSACTAPTQLEAPGMAPATCTACSGNNKPNLAGSGCFACTVSGCSHCGAGDKCEGCTSKDQKPSLDGSQCIACSIDGCVRCSEENKCGQCSDGYRLEGGRCVSSGANRSGLSAGAIAGISVAVVAVVGGLVGFLCWWFVCRGKA

SEQ ID NO: 577 - protein, 435 aa, Giardia intestinalis
SSGCVDENHFKADDDSACYLCGDISGNNENTNKGVADCNKCTKEAGTKTTCSECLSGRFLETNTCTKKCADTCAKCTAETDINKCTECMPGYFLKTEGVTKECVPCSDTAKGGIDGCSVCSNDGNTSKCTDCKPNYRKQSDSSPGSVTCTKTCEDPTACGGTSGACDAMIIDDKGNAKHYCSYCGETNKFPIDGICNSDAQSNTCNNHVCTSCTTGYFLYMGGCYSVSAQPGNYMCKTADSSGICTEAANNRYFLVPGASNTDQSVLACSNPLGTLTGTGDTAKAYVGVYGCSACTAPTQLEAPGMAPATCTACIGNNKPNLAGSGCFACTVSGCSHCGAGDKCEGCTSKDQRPSLDGSQCIACSIDGCVRCSEENKCGQCSDGYRLEGGRCVSSGANRSGLSAGAIAGISVAVVAVVGGLVGFLCWWFVCRGKA

SEQ ID NO: 578 - protein, 401 aa, Giardia intestinalis
SSNCVDADHFKADGDSACVLCSDTSGSDPKNKGIAGCKACTKTASANPTCSECLAGYYSSGSGTVTCTACGQNCATCTQAGNNQCTKCKAGFFLKGNGPGECVPCDDAQNQGIEGCAECTGTTGSLKCTKCKPNRKPAGNQDNYTCTEKTCEDETACGGTAGSCDATVIDNQGNAKHYCSYCGEANKFPINGVCVESSQKNGNNCNSHTCTSCAQGYFMYMGGCYDASKAPGNHMCKTADNGVCTTPNANNRYFLVPGASNTDQSVLACSNPLGTLVGTGDTAKAYVGVLNCSQCTAPAALSDGGMAAAICTSCDSSKVPNRDGSGCVLCSDTNCKSCVMDGVCGECSDGYSLEGGRCVSSGANRSGLSTGAIAGISVAVIAVVGGLIGFLCWWFVCRGKA

SEQ ID NO: 579 - protein, 560 aa, Giardia intestinalis
MFLLINCLIASTLAGACSTTQANCVAEKCEMVGETEICTQCKQNYVPINGVCEAAASSNTKCKAANGSDNADQTCKKCLLQTFMFKGGCYDKAGETGNLICTDAASGTTGVCATCKEADGFFRNPDAADTTDSCILCNDTTGVTIGESNNAKTYTGITNCVKCTKPDQLSAPGTKAATCTECASNLYLKTDSSATPATSCVTAETCKTGYFPNDNADSKKKCLACNTAANGGIDKCAECSLLTPASRAGAILITCTKCSTNSLSPLKDACLTSCPAGTYETGSPNKVCTPCHTSCAGCKDDNTAASCTACYPGSVLSYGSDNTKGTCIAECTGKYLENCADGQCTASIAGSKYCSKCKSGFVPVNGLCVSAETARAAPPGCTPDKTNGVCTACTEKYFLESGGCYQAEKFPGNTLCTTADAGKCTTCANGQDKDSNGSCPACPTNCASCAKDNTKTCNKCFSGYYLDTAKACKKCSETSGNIQGVENCISCLAPTSPQSSTPVTCYVKTSGGGSGDNSTGGDSGPNLSSGAIAGISVAVIVVVGGLVGFLCWWFVCRGKA

SEQ ID NO: 580 - protein, 503 aa, Giardia intestinalis
  misc_feature (310)..(310): Xaa can be any naturally occurring amino acid
MLLIAFYLILSTFAIACKNSGNSCEVGQCDTIGDTEICMQCNQGKVPINGICTAIQPDAAPNCKKAGGGELDQNAQVCGQCTGAYFLYKGGCYNSAQGVGAKLCTQAEQGVCKAPAAGYFIPPDAIAKDQSIMSCGDTTELVLVSNKKKYKGVAFCSACTPPPSAENTATAAVAACSACQSGYNLVQGENVCKRSDGCTIPGCKTCSSDKKTCEVCEDQKISAPSKEACLEGCPAGSYESNKKCAPCHVSCSSCSDGNSNSCTACYPGFVLNREADDNKGTCVPECTGKYMENCAEGQCDGVVGGSKYCXKCITNFAPVDGICVPTNSAMKKATGCTAGDGVCNSCTGEYFLQTNGCYRSAMFPGNIVCNNAQDGKCKKCANEQQPEGNTGSCPACPENCEKCNGVDNQKVCTNCLPGYYLDGNKACKRCSENSNYIIGNSNCVSCAVQSTGSGSMLCYVMKSDNGTNNKSGLSIGAIAGISVAVVVVVGGLVGFLCWWFLCR

SEQ ID NO: 581 - protein, 719 aa, Giardia intestinalis
MFGRFLLAIVILQLARAACEEDKTSTDGKCKTCGVTIGQDTWCSVCIGENYAPINGTCADITTDSVGSVFCTQKAGGVCTQCAGNSFMFAGGCYSSSEGLPGYNLCLRSAGNGVCAEAAPGYFIPGETAATKPSVISCSDKTGLLITAHTYKGVEFCEECSGSELTSGQDGTAKCTKCGASKYLKDNACVDNAEACGKGYFGKPDAAAGNKCIACTDQSGGGATGCAECMYDSNTRKAICTKCTTDYLRKKADGTTECVAVNECDDTQKGFYKVVDSTNGNKCVSCADGAGLAVGADGAWKGVDGCAKCTKPADINTPTKCDECKPGYEISTDKTKCTSTAPPDCPIENCKVCSEDKRACEECNSNNYLTPTRMCIDDCKKIGNYYYTTNANNKLICKECAVANCKECENTGTCKTCDDGFYKSSEECKACDSNCKTCNGGTSADCTKCLSGAVLKYGNDGTKGTCGAGCATGTGAGACKTCGLIIDGTSYCSECAVETEYPQGGVCSSTTVRAAATCKAGSVAKGMCNSCTNGFLRMNGGCYETTKFPGKSVCEEAASAGDTCQKEAPGYHLNNNDLVTCSPGCKTCTSNTVCTACMEGYVKTSDSCAKCAAGCATCTGSTTACDTCSTGYYESGTTCVSCTESNSDKTITGVANCASCAPPLNNKGSVLCYLIKDSGSTNKSGLSTGAIAGIAVAVVIVVGGLVGFLCWWFICRGKA

SEQ ID NO: 582 - protein, 719 aa, Giardia intestinalis
  misc_feature (659)..(659): Xaa can be any naturally occurring amino acid
MFGRFLLAGAILQLARAACEEDKTSTDGKCKTCGVTIGQDTWCSVCIGENYAPINGTCADITTDSVGSVFCTQKAGGVCTQCAGNSFMFAGGCYSSSEGLPGYNLCLRSAGNGVCAEAAPGYFIPGETAATKPSVISCSDKTGLLITAHTYKGVEFCEECSGSELTSGQDGTAKCTKCGASKYLKDNACVDNAEACGKGYFGKPDAAAGNKCIACTDQSDGGTAGCAECMYDSNTRKAICTKCTTDYLRKKADGTTECVAANECDDTQKGFYKVVDSTNGNKCVSCADGAGLAVGTDGAWKGVDGCAKCIKPADINTPTKCDECKPGYEISTDKTKCTSTAPPDCPIENCKVCSEDKRACEECNSNNYLTPTRMCIDDCKKIGNYYYTSNANNKLICKECAVANCKECENTGTCKTCDDGFYKSSEECKACDSNCKTCNGGTSADCTKCLSGAVLKYGNDGTKGTCGAGCATGTGAGACKTCGLIIDGTSYCSECAVETEYPQGGVCSSTTVRAAATCKAGSVAKGMCNSCTNGFLRMNGGCYETTKFPGKSVCEEAASAGDTCQKEAPGYHLNNNDLVTCSPGCKTCTSNTVCTACMEGYVKTSDSCAKCAAGCATCTGSTTACDTCSTGYYKSGTTCVSCTESNSDKTITGVANCAXCAPPLNNKGSVLCYLIKDSGSTNKSGLSAGAIAGISVAVIIVVGGLVGFLCWWFMCRGKA

SEQ ID NO: 583 - protein, 704 aa, Giardia intestinalis
MFGRFLLAIVILQLARAACQADGSGSDGSCKTCGVTIGQEQYCSECNGANYAPVNGQCADVNAEGQSKTLCPAKGQGKCTQCGGASFMYKDGCYSKDTAPGQSMCTQASEGKCTEAAPGYFLNPLRANTKDSVVSCSDTTGFTDSGKTYRGVQHCERCDGAALTDAAGGDAKCTRCGQDKYLATTGTCGEGCTPDTEFSKEDSDNGKRCFACGDVTTGVASCEKCTPPSPDQAKPACTKCGGNNYLKTAADGTTTCVEQSACSPDSFPVENSQSGNRCVLCGDAANGGVDKCAACTPTDQGRIAPTITCIACTNGYKPSADKTTCEAVSNCKTPGCKACSNEGKENEVCTDCDSSTYLTPTSQCIDSCAKIGNYYGATEGAKKICKECTAANCKTCDGQGQCQACSDGFYKNGDACSPCHESCKTCSAGTASDCTECPTGKALRYGDDGTKGTCGEGCTTGQGSGACKTCGLTIDGASYCSECATTTEYPQNGVCAPKASRATPTCNDSPIQNGVCGTCADNYFKMNGGCYETVKYPGKTVCISAPNGGTCQKAADGYKLDSGTLTVCSEGCKECTSSTDCTTCLDGYVKSASACTKCDSSCETCNGAATTCKACATGYYKTASGEGACTSCESDSNGVTGIKGCLNCAPPSSSTGSVLCYLIQNTNKSGLSAGAIAGISVAVIVVVAGLVGFLCWWFICRGKA

SEQ ID NO: 584 - protein, 235 aa, Giardia intestinalis
IDGASYCSECDTQNEHPQNGVCAATNRRTMTCNNLGSGVCNTCANGLLRMNGGCYETTKFPGKSVCEGANADADTCKTPTPGYKVEAGKLVTCSKGCDTCSDATICTKCGDGYTKIGSSQTCTKCDASCETCNGAATTCKACATGYYKTTSGEGACTSCENDSNGVTGVKGCLNCAPPSSSTGSVLCYLMKDGDSTGGSTNKSGLSTGAIAGISVAVIVVVGGLVGFLCWWFICR

SEQ ID NO: 585 - protein, 234 aa, Giardia intestinalis
  misc_feature (233)..(233): Xaa can be any naturally occurring amino acid
IDGASYCSECATATEYPQNGVCAPKASRATPTCNDSPIQNGVCGTCANSYFKMNGGCYETVKYPGKTVCISAPNGGTCQKAADGYKLDSGTLTVCSEGCKECTSSTDCTTCLDGYVKSASACTKCDFSCETCNGAATTCKACATGYYKTASGEGACTSCESDSNGVTGIKGCLNCAPPSSNTGSVLCYLMKDGDSTGGSTNRSGLSTGAIAGISVAVIVVVGGLVGFLCWWFXC

SEQ ID NO: 586 - protein, 709 aa, Giardia intestinalis
  misc_feature (708)..(708): Xaa can be any naturally occurring amino acid
MFGRFLLAIVILQLARAACQADGSGSAGSCKTCGVAIGQEQYCSECNGANYAPVNGQCADVNAEGPSKTLCPAKDQGKCTQCGGNSFMLAGGCYSSGEGLPGHSLCLSSGGDGVCTEAAPGYFLNPLRANTKDSVVSCSDTAGFTDSGKTYRGVQYCERCDGAVLTDAAGGDAKCTRCGENKYLATTGTCGEGCTPDTEFSKEDSDNGKRCFACGDVTTGVASCEKCTPPSPDQAKPACTKCGGNNYLKTAADGTTTCAEQSACSPDSFPVENSQSGNRCVLCGDAANGGVDKCAACTPADKGRAAPAVTCTACTDGYKPSADKTTCEAVSSCKTPGCKACSNEGKENEVCTDCDGSTYLTPTSQCIDSCAKVGNYYGAIEGAKKLCKECTAANCKTCDGQGRCQTCSDGFYKNGDACSPCHESCKTCSAGTASDCTECPTGKALRYGDDGTKGTCGAGCATGQGSGACKTCGLTIDGASYCSECATATEYPQNGVCAPKASRATPTCNDSPIQNGVCGTCANSYFKMNGGCYETVKYPGKTVCISAPNGGTCQKAADGYKLDSGTLTVCSEGCKECTSSTDCTTCLDGYVKSASACTKCDFSCETCNGAATTCKACATGYYKTASGEGACTSCESDSNGVTGIKGCLNCAPPSSNTGSVLCYLMKDGDSTGGSTNRSGLSTGAIAGISVAVIVVVGGLVGFLCWWFXC

SEQ ID NO: 587 - protein, 667 aa, Giardia intestinalis
MLLAIFYFVISALTAKCTPQTQTCEAEKCETIGETEICTQCQAGNVPIDGKCVEANTVSEKCKNASGDADANQVCGKCIGANFFMYKGGCYDKQGTPGSTICKTAGEGVCDDCQEGYFKNPEAAATTDSCISCGDMIGVTIIKDTNAKTYKGVDGCAKCTPPNRITGNAGIKTATCTGCDSNKIVKTDTSGTSCIEESACSNGFFVSDQRKAQSKDYKCIPRIDDPAKANCTACSDNKKPNLEGTECNSCTDQHCAFCVAEGTCQKCSSGFILDGQNCVKSDCKTENCKACTNPKAANEVCTECVFTHHLTPTSQCVQYCQTLGNYYAGTNADNKNACKECRVANCKTCVDQGQCQTCNNGFYKNGDACSPCHESCKTCSAGTASDCTKCPTGKALRYGNDGTKGTCGEGCTTGKGSGACKTCGLTIDGASYCSECATTTEYPQNGICTSTTARTAATCKNSNVANGICSLCTNGFLRMNGGCYETTKFPGKSVCTTTPDADTCTSVTSGYYIDGSSNLVVCSDGCAECTTSSACTTCKDGYTKIGNSQTCTKCDSSCETCTGAAITCKACATGYYKTALGESTCTSCETDSNGVTGIKGCLNCAPPSSNTGSVLCYLMKDADSTGGNTNKSGLSTGAIAGISVAVIVVVAGLVGFLCWWFICRGKA

SEQ ID NO: 588 - protein, 234 aa, Giardia intestinalis
  misc_feature (74)..(74): Xaa can be any naturally occurring amino acid
IDGASYCSECATTTEYPQNGVCTSATARAAATCKTGNVAKGACSSCTNGLLRMNGGCYETTKFPGKSVCLAAAXASDTCQTPADGYKLNNGALITCSAGCKTCTSQDQCDTCKAGYAKDSGNTKKCVPCATGCSECNADDATKCTVCAAGYYLSKEKCIACDKSDGGSITGVANCASCAPPSNNQGSVLCYLIKDSGSTNKSGLSAGAIAGISVAVIVVVGGLVGFLCWWFICR
